United States Patent Application Publication US 2007/0054278 A1 - sequence listing, part 58

SEQ ID NO: 95282 - DNA, 134561 bp, Homo sapiens
atttcattggcctgaacatagtgtatggatacgttgagtcaagaggggttggaaaatgtggtttgtcttcaaatctgggcacataagtgtcccaataatatatgggttctcctgctaaagcaaaaggggaaatggataatgagcaactagtaatctcttccacaaatatcaaatctcattgacatttggtggctcacttaacctgacaagtcctaaacacattaaaattaagaagatggagacttaaaagcactatggcacttatatttgttagctaactgtgttaatatcttctttccttggaggctgagacaggagaatggcgtgaacccgggaggcggagcttgcagtgagctgagataatgccactgcactccagcctgggcaacagagcgagactctgtctcaaaaataaataaataaatacataaatacataaataaagtaggttttggcccaataaagttataaatattgggaaatgctgaaaatataaatattttttcttggattcaaaaaagcaataaaacacaatgcttagtgaagctagttcttcttttcctaactggtcaatgccagcaaaaagaaaagacttctttccatctctattttagttgtaaagaaaaagattaccattgcttctctggctatcagaaaaataatcaacttctgaagaaaggttacaaattttctgcaaaagaaacagagtttggctgctctatacactggacaatcacttgttactacctattcaccaaatggaatcatctcttcttggcttttcctttcttaaattctttattgaattcaatacaataggtttacccctttgtgaaaatgtcttcttcctcactgggcttttgtagcatggtcctaccatgtacagttttcttctttgactatgtcttttttatctcctttactagagcttctttttccatccacctctaaaaaaatagacagttggtcaggcatggtggctcatgcctgtaatgccaacactttgggaggccaaagagggtagattccttgagcttagcagttcaagaccagcctgggcaatatagtgagatgctgtctcttcaaaaaacacaaaaattaaccaggcatggtggcatgtgcctatagtcccagctattcaggaggctgaggcgggaggatcgcttgagcctggaaggcaaaggttgcagtgagccaagattatgccactgcaccccagcccaggtgacagagcaagactctgtaccaaaaaaaaaaaaaaaaaaaaaagatagtcctcccaccttgttttcctcatccaatcctgctctcactgctctcaccccatctagaatccactggcactttcatcccctcccttcaatataatttctgtgtggaagacttccataggtaggttctagctctggcctctccaatcccaatttggaacttcagtttataaaaataacttaaaaaaaaaaaaacctagctcttccacgggcagttcaaatttaacaaatccaacactgaatttatccatttatcttttttttttttttttggagacagagtctcacttgctctgtcacccagactggagagctgtggcacaaacatagctctctgtaacctcaaacctgggctcaagcaggcttcctgactcagcctctcaagtagctaggattatgggcatgcaccaccaggcccagacaatttaattttaattttaattttgtgtggaaatggggtctctctatgttgcccagactgatctcgaactcttggcctcatgcattcctcccacctcttccttccaaagcacagggattacaggcatgaaccactgtgcccagcctcatcctattcttgtttgtcccaaagccattcctccttttacattctctatcttggttgctgacatgacattgccacctttccaattctttggactgaagacttgaacatcaccttgggtcatattttcccttcccacacctatatctaactgtataccaaaattctattgattcagccaccagagaggcactgcctttccaatgttattacttcttgtttagaatattgctgtgacatctagaggggtctatctgccttcagtcatcccacatacttctacatcttcttcaaaatatcttcaattggttataccttgcacacagaaaaagaccagaccatactatggtaactgcccaaggggttcaccttgcccgctacctagacagagccaattcatcaagtcaggggaattgccagagaaagagtaattcacgcagagctggttgtgagggagaccggagttttattattacttaaatcagtctccctgagcattcggggagcagaatttttaaggataacttggtgggtgggggaaagccaatgagccaggagtgctgattggtcagggatgaaatcatagggagtcgaagctgccttcttgtgctgggtcagttcctgggtgggggctacaaggtcagatgagccagtttattgatttgggtggtgccagctgatccatcaagtgcagggtctacaaaatagttcaagcattgatcttaggagcagtttagggagggtcacactctccagctgcatgactcctaaaccataatttttaatcttgtggctaatgttagtcctacgaaggcaatctagtccccgggtaagaaggaggtctgctttgggaaaaggctgttaccgtctttgtttaaactgtaaactaagtttctctcaaagttagttcaacttacgcccaagaatgaacaaggacagcttggaggttagaagcaagatggagtcggttaagttacatctctttcactatctcagtcataattttgcaaaggcggtttcactatttggattttgaggttctctataatcaagaaccaatttgtttaatgcctttcctacctcttccacactacttcttttccaagggacacccctagggatctaaattaatctctcccttatttctcccactgccctttatccaaaagccatccatggtactcatcacactctgctcttagagcatttgtgtttgtctgcttttaagtagtgaatctctggatcacttgtccttattgccttactgtgcttactacagtatctttaatgtaaaaagcactccataaatgtttgttgaataataactgtaaatagcccttgcttctgctcaatcttcaattcaaggatgacccttagcacagctatgaggtaaggcttcaaggactctccacgcccttgctatgctccccttactttcccttagagatgtccagtaccctcacattttctcctgctgacccaagcttcttactagggtgcttacacagaccactccttctaagcaattccagctcccagaacttgccattcccagtctcttaccaaaacctacatatccctgggatgaactttagagcccagcctcttcattttataaaccaagaaactaagtcccaaaaaagtgacatgaattccccaaagtcatgattccaagtccattgctctttctctcacatctgcgtttagtgcccatcctgcaactcaaccccttcgcttcaagctgctgctaaggattggcaaggggctgctgcttatcttcctcagtaacacatctctctcttaacaacagtcatctgtgctctgactcacactaatggatactggaggaagttcacattggtacctggactcatcctgttgttattttggtcacagtgcttttcctacctcctgaacccagacctcggagagacactgtcaatgctgggatatgtaaggcctgcacatttttgcaatgtgctttcttatgactgtggaataagtgatattcactgtctgatgcaatcctcccacatgccgcagaaaccatggtagcagaactccagaggcatccccccctgttgcattacaacttcctgggggaagagttcagttcatgaatgtgttgtaatttctgtgaagggtatctaaagtccttaaaaacatccatgaatgatccttttcaacagtacttggaaggaagtcagggacttcaccattaaaactgagccaacacagtaatgaaattcaatgaccaccacaggagacatatgaatgyctcagggaagaacaaaggccagcaaaatcagccaacagcagttacttccacaaaakgcatttacctgaataggaacttgaatggttttcaaggaatgacagtctccttccagaaagtgtcatgtgtttgttattcgtccagtaacactaagaatctaaatttaaattttggtttagtttgggattggtgctggattttagggaataatcttatcagggctggattattctagttagtgatgatctgaggaaacactgcatttcttcagatggaagaagggagcactggcagcttgctttttctgaaagctttgattacagaagtataggtccctgatgcttaaagggaccttacagcacatctgattcaactgccttttataggtgaagaactgattcctgttaacctgataacatagaaattgcctatcctattttgtgaaaatcatcctactctagaagtaggaaataatggagtaggaacctgggcactaaattatagttgttatattattaggactaagtgtgtatgtccacgggcctgacagaaatgaatgctctggaccccatccacttgcctttcatttgttcctgtgcccttttttcatacaaagtggatggcctctttaggtttcctttaggaaatgtgtaagtgcctacaggcctttgtgctcacattaaaataattttttttgtttttattttttggaaaaataacttaaagtctgctcagagacagctcaatttctttattttaaaaatgggataagacacactatttttagatggcatttgtgactatccaaatgaacaatgtaaagtactttcaaaaatagtgctttgtcaaagaaacaagttattctatttactttatgtatgcattccatttatttcttcagcaaatatttatgaagcacttactagcatgatcacaatttcagttaaatagttaagtacagtagtcccccctttatccatgggttcattttccacataattattcaatttaattattagttattgttaatctttcactgtgcctaatttataaatttaactttatcatatatatgtataggtaaaaacataatacacatacataggtttcagtactatccatggtttgagtcatccactggggatcttaaaacatatccccttggattaaagggaaatactgtaattaattgcttactgcctgtatcagtcactagaattccagctttctgggaaaaggtacttcttctcttttgttctctaatgctcagcaccctgcgtggctggcatttaaaagactaacaaatatttgttgaatggatggatgaatgcatgaatgaaaaaccaaatgaataatgaaaacaaaagtgtataatacactataacacgtactatattgggcttgcgtagtactatgggaatctatagtaggagcatttaaagccagccttgacggggctaatctccggaagagcaattaatcttttcaaaatccgactcttgcaggatacggtcccccactggcctgccactagtttaaaacgaattagtttctgtgaaacatcaggatcgtgccaatagtaggggaccaataagactgaataagtcaaagggctgcgcggacaagtccaattagaacacctctggctaaaagccagaatgaatgaaagggttcatgcctcggcgtagacacacaactgggactgaaaaatctgccccaagcctccacgtcgactttggctccacctgcagcggcggcgccgtagtcacgtgacccgggcccccgcgccctaggcgcctgggccagcctgcgcctgcgcagtactcggagacagcggacccgtgtcagtgacagcttccggtttggtttctccgccttctgcttggctagagctattggggctcggtggcggccgcagtggggtggagggggcagggcgtggtgaggtaaggtgagtgccgtagtggggttccctggagccatggcctgctccattgtccagttctgctacttccaggacctccaggccgcccgggacttcctctttcctcacctgcgggaggagatcctcagcggcgccttgcggagggaccccagtaagtgcctctctggcctcgcccttccttccctcgtcacccgcggcctctgctcacgggttcgagtctcctactcrctctgcgcctcctgcctctgccctctggacccccagttctccccgtgcctcccctccgctccgggatgacaccctgcccacctcgtcctgaagccccatttgtgttgtcttcctctcgacccagcttttctccttaggccctctgacccctggctaaaaactgcgtcttgtttcctctcgcctctgcctatcaccgctttctccctccctccccccacccccacacattcctagctttctctctgagtatcttctccgtctcccatcttcagcctggggtcgttccctgtttcatgttgcctgctccgtgatcgcatcctccccgttccttgccacatgtcagcgctccactctggtattgccccagctcccactctcttccatcccggagactgtggccttctgctacctcccattccgaaagtgttgatcatccccccacactctcccttctttcatctgcatttcccccattcagattttgagaacaaatggctgacaaatgagtgactcttgaggtaagactctctcaaagaaggaaaataacctgtcaggaagtgaaygagaatctacattaggaactaaaattacagtgacatagccaagaaaggttaatttgctttattgaagccttccacctatttttatcatcaaagtgtttaataagcctttccccaagtagtataaagttccaaggctggtttattagatactatataggctttcagaatttcgtacatttcattttgaaagggtgtgccttgtgttttattttattttattttattttattttatttttgcatttccaacmtgaagcacatttggctttgtagtacagcgctctcactttgtgctataccggaatggtgatataaagcccactaagctcctctcccttttttagaaaatttagaagatatcaaatcgaacccatctgtgaatgattgcatactttgtgccagtcattggtgctacaaaccaaataaggttggtggaccctgctgtaggaacttctggtttacagacaaatcattaacttccattcagtgtgactgagatatacatgaggcattttcttgaagtggtgatacttaagcctacctttgaagtactagttagaggagtaaaggagcagtaatagcatgtgcagaggaagggaggcctgaaatggcatggtatttagagaactaagaaaagctgaatggctggagaggaggatgggagaggaagagttggggcaatgaggcagtagtagtaataaggagctagaccatgagaggccttgtgaaaattgtggcgtttctctgaaagtttaagtagagaaatgacattgtcagatttgtacttaatgtaatcaacaacatttgttgaagacctgtaatgtgctctggtagcaaagtggaggagagattggaagaagggaaatggattgggaagctcttccagtaatccaagcaagaaattatgtgagcttgaattaagaaycttagtaggatgaagatgaaggactagattagaaagacgttaaggagttagaatctgcaggaccttgtgaaggtctggtgatgggcattgtaactagtaagtgagggggagtttaggaagtctttggcttgtggtttgggcaactatatgtaataagagaatgaaggatacagattttcaaccttttgcattttaaatgtttatggtatgtccaagtaaggacatctggttgaacaccagatatagatagtctaaacagtagggagtactgggccagagatgttaattggggagctaacagcaaaaagtgtcagttcagtctcaaggattatgtatgttgtgaaatgcactgagtactaaagctgtaagcttagaggagcactggtgtttaaaagtcaagtagaggttactgggaagaagactgagaaggagtaaaagaaagaggaaaatcatgtgagagtaaggccctcggagctgaggaaggcgagaacttgatgagggtgaggaatggtcagcagttttgcaaatgcagcaggggtcaggtaagaaaaggatagaaaaatgcttattggttttgagaaggtggaggtaacttggaccttaggacagtttcagtaggatagtggaggcagaaagcatagttataggataaggggttaaaaagtgaaatatactatttcaaggagcttggctgtgaaggatagcagatgcaggattgtagatagggaatgtagaaaaaaggaacagattttctttatccttctaccactctcctggtccaggccaccatcttttctcaacctgggctatgatatgatatgtgtcttcttctagcaattcttcctgcttttgctcttggtttcctgtaataattctcaacagtagttacagtgagcttttaaggcataatttagatcacaacattgcctttttttttgagatgaagtctcactctgttgcccaagctggagtgcagtggcatgatctcagcttactacaacctccacctcctgggttcaagtaattcttctgcctcagcctcctgagtagctgggactacaggcatgcgccaccatgcccggctaatgtttgtatttttagtagagatggggtttcactatgttggccaggctggtcttgaactcctgaccttgcgatccacctgccttggcctcccaaagtgctgggattacagtcatgagccaccacacccagcctaacattgcccttttaataacactcaatggtttttgattgcacttaacgtaaaatccaaagttcttaaatggtgtataaggcccttgagactctgcttcctgccatttcttggaccttatacacctctccccttatttcttatgcttcagacgctcttttttgttgttaaaccagccaaccacatttgtggctaaggtttttgccctcactgttgtctatgccttggatgctttttgcagatctttgcatgctagttgcatcttgtcattcaagtctcagctcaaatgtcaactcagggcagccttttctgaccacctgatctagatctaaagtagtcaatacaacccccttgttcctacttgttgttctcaatcatatcatcctgtttattttcatcattatatttctactgtscagtatggtaacctctaggcacatgtggttattgagcctgtgaaatgtggccagtgcaactgaggaactgaatttttaaaattcaagttaattttaattaatttaaatttaagtagccaaagtggctaatgcctataatatagtatggcacagttataggtgctaaaactcargtacatacagattgaatacttgtccaagttacataggcagttggggatataaatacaccccaaacatctagattaatttgcactatacctatagatttataaatatggtttaatgtatttctcttctaaatcaaattcttgagtttatgtatgttgatattattgtggctatgatcagttcatgtagaaaatgaacagaatggacctcttcaccagtgagcccctttgtaaaacctgtacagatgatctcagacttatgatggtttggcttccaattttttagctttacagtaatgtgaaagcaatgtgtactttgtagaaaccatacttcaaattttgcactttgatcttttccagagctagtgatacaatgggtaagatactcttttgtgatggtgggtagcagcagcaaatatgagagactgtactctacggtattcaagaagtactgtattcaagaaattacatgagatattttcaacccttcatgataaaatagactttgtgttagaagattttgcccaactataggctaatgtaagtgttctgagcacttttaagatagtctaggccaagccgtaatataaagagttttgaacgtaaacttttgtacagtgaaattttacagagaaaaaatgacattagcagagcaggtaaataggacctgacttaaactgctgatggtatttgcctttgcttttcttcactttatttattaatgttataaatgtttattgggaagcagaaatcatgagatcatcttaaatttttttagctgatatagttgtaatttcttaacctagctcatctctagaggatatgtaaaaacataaaacacctcaattacttgtgaattatagaggtgtatcagttggtttaaaagtgcttttattgggctgagctcttggaagactcaggtccttgggtcataggcatcacggaccaatctgaagaaaactgcatttcagggcctgttgaggctaaaactccagttggaggtccagaacatgttctcgtgactcagcaatttccttgtcagaatccattacctgcaaatagtggccaggctcagtgggtcttgtgtccttcaaattcttcgcagcgtrttcctttgcaagcacaaaagcttgtctccagtcacaagccagttcagaatcagaagcagaagcaattgcaggcaaccagtgtacctcatcctgcctccaggccactgaataacacccaaaacagcaagcagtccccgctgtyggcacctgaaaataatcctgaggaggaactggcatcaaaacagaaaaatgaagaatcaaaaagaggcaatgggctttggaagaccttgaaattggtcgccctccgggtaaaggaaagtttggtaatgtttatttggcaagagaaaaacaaagcaagtttattctggctcttagggtgttatttaaagctcagctggagaaagcaggagtggagcatcaactcagaagagmagtagaaatacagtcccacctccaacatcctaatataatcagactgtatggttatttccatgatgccaccagagtctacctaattctggaatatacaccacttgaaacagtcaatacagaacttcagaaactttcaaagtttgatgagcagagaactgctacttatatcacagaattggcaagtgccctgtcttactgtcattcaaaaacagttattcatagagacattaagccagagaacttacttcttggatcagctggagagcttgaaattgcaaattttgggtggtcagaacatgctccatcttccaggaggaccactctctgtggcaccctggactacctgccccccgaaatgattgaaggtcggatgcatgatgagaaggtggatctctggagccttggagttctttgctgtgaatttttagttgggaagcctccttttgaggcaaatacataccaagagacctacaaaagaatatcacgggttgagaattcacattccctgactttgtaacagagggagccagggacctcatttcaagactgttgaagcatgttcccagccagaggccaatgctcagagaagtacttgaatacccctggatcacagcaaattcatcaaaaccatcaaattgccaaaacaaagaatcaactagcaagtattcttaggaatcgtgcagggggagaaatccttgagccagggctgctgtataacctctcaggaacatgctaccaaaatttattttaccattgactgctgccctcaatctagaacactaaaagaaatatttgttttactgagcaggtgtgccttaacctccctactcagaaagctccacatcaataaacatgacactctgaagtgaaagtagccacgagaattgtgctacttatactggttcataatctggaggcaaggttcgactgcagccaccccatcagtctgtgccaggcatggtgtcctcccaggaggcaaatccagagtctggctatggggaaagtgaccactttgtgctgactcgatcggttaaggagctgtccaataaccttccaagtacctgagtgagtgtgtaacttattgggttggccaagcctggtaaagctgttggactgagtacgtgattctttttaagtaggaaaataaagatatttgtacagaaaaaaaagtacttttattttactgtggacagctgctagagatatagtgataccactctcttctatatttgaattatcaaagtatgactttatgttactttgtatatttaattacaaaagaagactgtcctctgtagctttaaaagatgctgaaccctaccctttcccaatgtttacattaatgacaactgttaaattttgtttttataaagtaaatactatctacttaagacatgaagtctggtcttactgctttgtggcttttttgtttgttttgtttttgttttttagagacagggcctcactctgtcacccaggccagagtgcagtggcatgatcatagctcactgcagccttaaactcctggattcaagggatcctcccacctcagtctcctgtgttgctaggactacaagtatgcagcaccatgcccagataatttttttggtttttgttgagatagggtcttgctgtgttgcccaagcaggtcttgaactcctgggcttaagtgatcctcccacctggactctcaaagtgctagaattataggcatgagccactctccctggtttattactttgaagttgcagggatgggtggagtataggtccccactttatgggtccccatttaacctatagtgacataatttccaatgcctagaccagaactttctgaaatttacagttgggttgggcaaaaatataaataaatatataaataaataaatacatgaatagagagggagagccagaatagttggagataatttgggtattataatattgtggatttcttgatttacctaatagtaaaataatttcttattgacatactaaaaatgtggaatagttttccttcttgcctcttttaccaaccagaatataaagcatgtagggaattatgttgaaataatcaattcatgtttttaagcaatctctgagaaaaatgtgctttatttaggataacctaaaatcatagaatcactttgcataatgggctatcacaaatgatataaaatactctattttttatatgtagtaaaatattttctctagtttgagatcatactaggagagaaaataatctgaaaatagaacatttatagagatttcagaaaatatatagagttactgggtttctttaaaattggaagaggatcatacagataaaattttaccagtgaggaaattgagatttgagtgttcttcagtttcttcattcaggtagtatttattgagcatctactatgttctaagcacaaaatgagtttaaagataaataaaataagtccctcaagcaattttcagctaataaaagaagacacgtatgtgaaacgattgttagaggtgttatgctatgatatggcacatgatgggagagaatgaaggagtgttggtctagtctatgcaggaaacccagaaagtcttcatataggaggtgatatttacacattaatagtttaaagatgtccatcagatggagagaaaatagacaacagatgtgaaacagtatgggattcagaaagctgcaaatagtaaattgtggtgggagggtgggatgtgttcagaggtgaaattgaagaggttggtgaaggagtttagattttattcagtagcagggtctttagattgaagtaagagtaccttgggatcatggaaatttataaaaggttgcttgggaacagatgattttaagtaaatcattttccacatgtacctgtgaaagtgcctactttctcaccctgccttctcccactttatctctgacacgtttgtagtcttattatagtaagttgcttcaaggtgtaaaaaaaacctcccctttaatcaaagtgttgtaaattcctccattcgttttattattagttttccaaattttactttttgtttaattatcaagatttatgatatatttatgttgttttcctcacttatttacataaaataattgtaataactcaagcaagaagaaaaatgttaatacttaagagtcttatcacaggaaaatgttttcttaattcatatccttttttgcagagagagttttgtactgataataataaaaatctgtgtttattagaatagcattctgtggaggaagtagaatagaaataagtattcaaggagaataaaggacttgtaaaaactgttgagaaggtcagcatttttttttaatggatgtcrgtgggtatcatttccctatagtgtttagaatccactaagttttaaaaagtaataatagttttatgtttaaatgtacatgtttatagtataacagaaattacatattttttgcaagagatacatactaaaaaattcttttggggcatatatgaacaaaaaatttgaaggtcattctcctgtaagactcagtgattcccagtcttgtcttttcttttttttgttggcataatagcgtacataagaaaaatgagatatggaccccaaacagctaaaacaattttggaaaagaagaaacaagttagaagattcacactttctgatttcaaagcatattgcaaagctgtaataacccaaactgtatgatactggcataaagacaaacaaaccaatggaatggaatagatagctgataagtaaaccctcacatayatggtcaagatgatcttcagcaagtgtgccaagagcattctttgggggaaaagacagcttcttgaatatatgatgttagaggaaatggctatccatatgcaaaagaatgaaattgaatccttatcttataccatatacaaaaattaaatagattaaagacctaaatgcagcacctaacactgtaaaactttagaataaaacataggagaaaagcttcatgacattggacttgcatgcttttggatatgacaccaaaagcataggcagcagaagcaaaagtggacaaatggggctacactaagcttaaaaactttgtgcatcaaaggacacaatcaacagtgtgaaaaggcagttttcaaaatgggagaaaatatttgcaaatcatgtatctgatatgggattaatatccagaatatataaagaattcctgcaactcaataacaacaacaaaaaatcaaccctatttaaaatgagcaaaggacttaagtagacatttcttcaaggatgatatacagatgaccaaaaagaacatgaaaagatgcttaacatcactaatcatcagagtgatgcaaaccaaagcataatgaaatgttacacctattagaaatggctactataaaaaaaaaaaagtatcaggatatggtgaggatgtggagaattataaacttttgtgcattgttggtgggatgataagatggtacagccattaaggaaaaaataagagttcctcaaaaaattttaaaaaaattatatgatccagcaatatcacttcaaggtgtatatacagcagaattgaaagcagggtcttgaagagatgtttgcacacccatgttcatagacagttcacagtagccaagaggyggaaacaacccaaatgcccatcgatggatgaatggataaacaaaatgtggtattatacacacaatggaatactgtttagccrttaaaatcaaagaaatgtcacatgctataacatgaatgaaccttgttaaattatgctaagtgaaatattccagtcacaaaaagacaactactatatgattccacttacatgaggaagctaaagtagtcatttatagaaacaaaaaatagaatggcggttaccagaggctgaggaaagggagaacgggaattgtttaatgatacagagtttcagatttgcaagatgaagttctggagatctttttttttcacaacartgtgagtacacttaacactactgaactgtccacttagaaatggttaagttgataaattttatgtttttttgtttgtttgtttgtttgtttgttttttcttgagacagagtcttgctctgtcgcccaggctggagtgcagtggtgccatcttggcttactgcaagctccacctcccgggttcacaccattctcctccctcagcctctcgagtagctgggactacaggtgcctgccaccatgcctggctaattttttttttttttttgtatttttagtagagatggggtttcactgtgttagccaggatggtctcgatctcctgacctcgtgatctgcccgccttggcctcccaaagtgctgggattacaggtgtgagccaccgcgcctggcctgtgtgttttttttaaccaaaatacaaaatgtcaatcaattagattaataataaatagattatttaaaaacgcgacaaagctgcttatgatggaaagtgacataagttccagtagttccaggccctacctgactgcttttactgctaaaaggatcaatatcttggctcacctgcaacccatttacagcatactaagaatctctgctatgggcagagggtagccattgatggttttaagtaaaagtgtagcaaaaatattttaagatttgagttctaaacagatatatttggtagctgtaaagagaatagattgggcagttcaaagctagaggcaggtgaccattagatagatagttgtagaagtccaagttagagcccataaaggcagaactaaggtgatagcaatggcagtggagtttgagactattagaatttgagctgagaaataggatagccagacaaatattttagagacatttctttgtcagcaaagagaagaatggatgggagtgatgggtaaagtggaagtggagtgaccagttaggaggctattgcagtattccaaaagaggagattatcttttccttagcatggttttcataagaggttattttatagtatacacagtgacagtcctggaagtatgacaagtatttttgaatgagtactatgcttaatacaatttgggactattgagaccttgaatgaagagtaagttgttgaaccttcctcatagagaagaattcttgaaactcctaggtatctgctgtgaccatatcttgcctttaaaaaagagaccagaaatggtcccttgaacatagattacttttctttgtacaatgtgagtctaaatctcacatttaagttccccagaagagagaatctcatcaggtcaagagagtagacattacttaccacattgcccccccttttttttaaagtatgtaaaatcagacataaaaaccaccacctggctactcatactctacctttcagacgttaaaacctcagtactgtgctgtctaacatggtagccactagctacatatggctatttacatttaagtttaaatcaatagtaattaaattttaaaaaattcagttcctcagtcacagtggctacatttgaagtgttcaagccatatgttgctagtggctaccatattgagcagcacagatacagaatacttccatgattacagaaagttctattggaagtattgccttagtaagacttttttcttcttcttcttcaacttttaagttcagggatgcatgtgtaggatgtgcaggtttgttatatatgtaaatgtgtgccatggtggtttgctgcacagatcaccccatcacccaggtattaagcccagcatccattagctattcttcctgatgttctccctccccccaccaccccaacaggccccagtgtgttttgtcctcccctatgtgtccatgtgttctcatcattcagctcccacttataagtcagaacatgtggtgtctgtttttctgttcccgcattagtttgctgagaataatggcctccaactccatccatgtccctgcaaaggacgtaatcttgtttctttttatggctgcatagtattccatggtgtatatataccacatttttccttatccagtctatcattgatgggcatttacgttgattttgtgtctttactattgtattgtgaatagtgctgcagtgaacatatgtgggcatgtatctttataaaagaattatttatattcctttgggtatatacccagtaatgrgattgctgggccaaaaggtatttctgcctctacgtctttgaggaatcaccacactgtcttccacartggttgaactaatttacactcccaccaacagtgtaaaagcattcctttttctctgcaaccttgtcagaatctgttgttttttgaccttttaacaatagtcattctgactggcataagatggtatctcattgtggttttgatttgcatttctgtaatgattagtgatattgagctttttttcaatatgttttttggctgcatgtatgtcttcttttgagaagtgtctgttcatatcctttgcccagtttataatgtggttgcttgttttttcttgtaaatttgtttaagttccttgtagactctggataattagacttttgtcagatggatagattgcaaaaattttctcctgtagattatcagttcactctgacaatagtttcttttgctgtgcagaagctcttttgtttaattagatcacatttgtcaatttttgcttttgttgcaattgcttttggcattttcatcatgaaatctttgcccatgcctatgtcctgaatggtattgctagattttcttctagggtttttatagttttgggttttacctttaagtctttaatccatcttgggttaaattttgtatatgttgtaaggaaggggtccagtttcgatgatctgcatrtggctaggcagtagtcccatttattaaatttattaaatttattaaataaggagtccttcccccattacttgtttttgtcaaatttgtcaaagatcacatgattgtaggtaagggccttatttctgagttctctgttctgttccattggtgtatgtgtctgttcttctaccagtaccatactgttttggktactatagcttgcagtatagtttgaaataaggtagtgtgatgcctccagctatgttctttttgcttagaattgtcttggctatttgggctcttatttggttccatatgaattttaaaataatttttttttctaattctgtgaagaatgtcagtggtagtttaatgggaatagcattgaatccataaattactttgggcagtatgaccattttcacaatattgattcttcctatccatgagcatggaatgtttttccatttatttgtgtcctctctgattttgagcaatggtttgtagttctccttgaagaggtccttcacttcctttgttagctgtgttcctagatattttattctttttgtagcagtcatgaatgggagttcattcataatttggctgcctttctgtcgtagtgtataggaatgcttgtgattttttgcacattgattttgtatcctgagactttgctgaagttgcttatcagcttaagaagtctttgggctgagatgatggggttttctagatataggatcatatcctctgcaaacagagacaatttgactcctctcttcctgtttgagaaccctctatttctttctcttgcctgattgccctagccagaacttccaatactatgttgaataagagtggtgagagagggcatccttgtcttgtgctggttttcaagggaaatgcttccagcttttgcccattcagtatgatattggctgtgggtttgtcatacaaggctcttactattttgaggtatgttcctttaatacctagtttattgagagtttttaacatgaagggatgttgaattttatcaaaggccttttctgcatctattgaggtattcatgtggttttttgtctttagttctgtttatgtgataaatcacatttattgatttgaatatgttgaaccaaccttgcatcctggggatgaagccaccttgattgtggtagataagcattttgaggtgatgctggattcaatttgccaatattttattgagaatttttacactgatgttcatcaggaatattggcctgaagtttttttcttttgttgtatctctgccgggttttggtatcaagatgatgctggtctcatagaatgagggaggagtccctccttttcaattttttggaatagtttcagtagaaatggtaccagctcttctttgtacctctggaagaattccactgtgaatccatcttgtcctgggctttctttttggttggtagggtatttattacaatttcagaattcattactggtctgttcagagattcagtttcttcctggttgagtcttgggargatgtatgtgtctaggaatttatccattttttatagattttctaccttatttctctgtgtttataaacacagaggtgtttatagtattctctgagggttgtttgtatttctgtggggtcagtggtgatattccccttatcatttcatattgtgtttatttgattcttctttcttttcttctttattagtctagctagagttctatctattttattaatttttttaaaaaaccagctcctgaatgcattgattttttttgaagggctttttgtgcctctatctccttcagttcagctctgatcttggttatttcttgtcttctgcaagctttggggtttatttactcttggttctctagttctttttacttgagatgttaggttgttaagtcgagatccttctagctttttgatgtgagcatttagtgctgtaagtttccctcttaacactgttttagctgcatctcagagattctggtacagtgtctctttgttctcattagattcaaagatctttttgatgtctgctttaatttcattgtttacccaaaagtcattcaggagcaggttgttcaatttscttctggttgtgtggttttgagtgaatttctttctttctttttgtttttttttgttttgtttttttttgagatggagtcttgctctgtcacccaggctgaagtgcagtggcatgatcttcactcactgcaacctccgcctcccaggttcaagtgagtctcctgcctcagcctcccaagtagctgggactacaggcacgtgccaccacgcccggctaattttttgtatttttagtagagacatggtttcaccatgttagccaggatggtcttgatctcctgacctcgtgatccgcccacctcagcctcccaaaatgctgggattacaggcatgagccacgacgcccagccttttgagtgaatttcttaatcttgaattctaattcgattgttctgtggtctgagagactgttatttcagttcttttgcatttgctgaggagtgttttacttctgattatgtgatcaattttagagtaagtgtcatgtggtggtgagaaaaatgcatatgcagttgaatttgggtggagatttctgtagatatctatcaagtccacttgttttagagctgagttcaggtcctgaatatctttgttaattttctgtctccatgatctaatgttgtcagttggtgttaaaatctcccactattattgtgtgggagtctaagtctctttgtaggtctctaagcacttgctttgtgaatctcactgctcctgtattgggtgcatatatatttaagatagttaactcttctttttgaattgaaccctttaccattatgtaatgcccttctttgtctttttaaatctttgttggcataaagtctgttttgtaagtctgttttgtcagaaactaggattgcaacccctgcttttattctgttttccatttgcttggtaaattttcctccatccttttattttgagcctatgtgtctttgcatgtgaggtgggtccttgaaggttttgcstctttatccagcttgacattctatgtcttttaattggggcatttagcccatttacatttaaggttagtattgttatgtgtggatttgatcctgtcatcatgatgctagctggttattttgcagacttgtttatatggttgcttcatagtattactggtctgtgtacttcactgtgttttcgtagttgttggtaatggttttttattttcatatttagtgcttccgtcaggagctcttgcaaggcaggcctggtggtaacaaatttcttcagcatttgcctatcggaaaaggatcttatttctccttcatctatgaagcttagcttagccaggtatgaaattctggcctggaaattcttttctttaagaatgttgaacattgacccccagttgagagatttgctgttagtctaatgggtttccttttgtaggtgacctggcctttctctctggctgtccttaacattttttctttcattttgaccttggagaatctgatgattatgtgtcttggggttgatcttcttgaggagtatcttcctgaggctctttgcatttcctgagtttgaatgttggcctgtcttgctagattggggaagttctcctggatgatatcctgaactgttttccaacttggttctgttctctccatctctttcaggtaccccaatcagtcatagatttggtctctttatgtgatctcatattttccagaggttttgttcattccttttcattttctttccctctattcttgtctgactgtcttatttcagaaagatagtcttcaaggtctgagattctttcctccacttggtctgttctgctattgatacttgtgattgtattgtgatcttctcatgttgtatttttcagctccatcaggtcagttaccttcctctctaaactggctgttgtggctatcagctcctgtattgtttgatcatgattcttagcttctttgcattgggttacaacatgctcctttagctcaccaaagtttgttgttatccaccttctgaagccgacttctgtcaattcagccatctccacctcagcctggttctgtgcccttgctggaggggtgttgcagtcatttagagaagaggaactctgactttttgagttttcagtgcttttgtattgattctttctcatctttgggggctatctatcttcagtctttgaggttgctgacctctgaatgaggtttttgtggggtcttttttgttcatgttgttgttgttgttttctggttttcttttttttttctttgaaatttaaagaaaaaatttattgaagatctgaaaaacaattcctaaaagattgacttttccagaaaactagctacacartgyattgcatctatcatgttaaaacgtgcattagacacaaatacaaaaaccatgaaacaagccaccattcttcaacaatttgagccaagataaaatgcctaagtaacaacatggatgccttgcaaaggatgggctctttactttaagcaccataaaaaaaaaaaaaaaagcacaaatggatgagtgtgttcagttatatacactgaattgaacctttggcactaggaatcagagcattttgtcatatagcattaacatgtattataaaagtgcatagtgtcaaaggaatagaaccaccagcattcaaaagcagctttgtcaactaggcaataaaacactctacagcatatccctctgttgtccatcattgaaaacactggcagcaactttgaaatgaaaaaaaaaaagaaaagaaaaaaggagctattaccccttttattttctctgtttaaaatcaaacagaaaacaaacatcaattgttatacactaacatcttcaaagcacatygtttgtacaagagatagactaagaacaaaaatgtgtttacggagatccaaacataagtgagtgagagtgcctctcacacagctttccgatggtactcaggaggagccacttcataatcgctggcactaaacaaagttgcagaattctttgccaggtactttaggaaatcgtgaagataattgagtaataaagcaaggctcttctcatccagaggtgtataggccaacattgctccaattcgtacaaataatctcaggagatgtggcgctccatacacctgggacatgggtgcatcgggatgatctgcaagaatttcggcatactgtggtctctcaaatttatagagtagctgggtacccaacattacgttgaagtattcttttatccctgccacaacttcattaaccgcatactccttattatctgtgtttccacgagatttcttgtaatttgcataatcctcaagaatggaatccacattcttcttkgcaggaagataaaagagctgtttttgcctggtaattaagtcccagtcatcaacaagccacggttttagctattcaggaatctttactttaacttcaactctgttcatgaatgtttcctcattttcaacagtaggatctacccgggcyctyttcttccaaggaggctgaggggtctcactggtactgccaccatctccatttccaggtgttttctgyttgttctttttcgttttcacttcaacatttttctgttgcagaccagatgtcttctttcctggggcagcccctctcatcttcccctctgcatactgctcctgattggctttttgaagttctcgctgtttctgcaaattggtgtccacgtatttgagtactctgctctccggaacccactcatcccaatttttattccaaccactgtaatgtatgaagtatttcacttgtttgtcctttatggcaacctttacacactttgcttcataaagaagaggcccatgaaagcacagcactcgctcaccctcctggaatttaggcttcgggtcctgcttccgcgccatttataagtgatttgccgcctcctccttctcccaccacccccgactaccgccccctactctctaccccacccaactccgcgtcagacgcgccgtcaggcactgccagctctacatcctgggttctggttttcttwtaacagtctggccactctaccatagggttgctgcagtttactggggatctgctccagaccccagttgcctcagtttctcctgtacctggaggtatcaccagtgaaggccacaaaacagcaaagatggcagccagccccttcctctggaagctgcattctggtggagtactgacctgttgctggcccacatgtacctgtaggaggtggctggagacccctgttgggaggtcccacccagtgaggaggaatggkatcagggtcccaccccaagaagcagtctggtcacaatctgacaaggcagctgttcttcattgttggggaaccttcctcgtaaactgtctattctccacagccagcaggctggagtgcctgagtctaccgaaccacaaagatggtagccacccctccgcccctgggaacttggacccatctcagggagattccaatctgccaccattggctggctgggattccaagccagtgggtcttaacttgtgaggtgccgtggaagtggggcccacaaaacaatgctgcttggctccctggaatcagcccccttcttagggatatatacagacagatttcctgccttgccagcgatcccagctgtagtatgtaaaactcatggttctctgtgtgtgcctgagtggctgctctgccgagactctacacagctctgtgtatcagacccaaggccctggtggtgtgggctcatgaggagatctcctgatccatggaaagatctatgcaaagatccatgggagaagtgtggtttcccaggtagggtagcacaattactcactgcttctcttggcgggaggtgacggtttctttggctccgtgccccttccaggtgggccgtcgccccctccactccctcgtacttttcttcgttctctttgggtcaagctgtttgtccagtcagtcccagtgcaagaacctgggtatctcagttgaaggttctgaattcacttgccccttttcattyctctccataagctccacagaccacagctgcttctaatcgtccatttcaggtctgagacttctttcagactttstgtgctcagtcaacacacacatacacacaagctaattgggaattttatttatttgtaattttatattgtgatctcatttttataaaatgcatatctgcaacctttgtagtttaattatatattatataatatctatatctttccaagtcatttatagttttcaggtatatatagctctagcttgttttttttcttcattttctctttttttttttttttttyctttttttgagagagggtctcagcctatcacctaggctgtgccatcatggctcactgctkcctccaccatctgggctcaattgatcctgctgctgccttagcctccccaaataactgggactacagacatgtgccaccatgtccagctactttttctatttctttgtagagatggggatctcactatgttgcctaggctggtctcgaatttgtgggctcaagcaatcccaccacctcggctttccgtgctgggattacaggcatgagccaccgcacccagtctatagcatgttcttaatggttacataatattacactgaagactccactaggctctatttaataattgcctgatcagtgaacatttttaaggttatttctgatatttttgctgtaagaacagtgctccactaagcatccttatacatgtgggtcacaattgccaaattactctaaaaattggttttcaggttcagtcctatctatgataatcagtgcctatctacacatacacttattatcataatatgatcagtgtctttgacttttgttcttctgataaatgaaaaatggtatatcatggctttaattcatacctcttaaaattgagaaaagttgagcattttcaatgtgtatcagtcaagtagagcttgctttgtaaattaactattcacaatttttgctgactttttaattgtatctttaaactttttctattgttttacaaaagtttatcatatcctgtgtttatattttgcaaatatttatataatcatatctcttaacctttgcctttttagcttctgtttcatattctcctttgaaagatctttccaatcttaagcttgtaaaacattctactagattttaatctaaatctaaatatcttaatctaaatatcacatttgtgtgcatgtgtgtaagtgtgaaatctaaggtggaaacctatccttattttattgcaaatggatatgcaattgttttaacacaatttattaactaattcatcaacttcctactaattcgagatgctgtttttaccatgttaactagtcagaaatacttgcctccttttatggcttttcttctgtttcactgacttatttgtcaatttctgtccattttaatgcttagtagagacagtttctgccaaagtacttgtattactccattctcacactgctgtaaggaaataacctgagactggtaatttattaaaaaaagaggtttaattgactcactcttcagcatgcctgaggaggcctcaggaaacacagtggtggaggaaggggaagcaaacacattcttcttcacatagtggcaagaaggagaatgagtgagagcaaagttgggggagagccccttataaaaccatcagttcttgtgagaactcactatcatgagaacagcatgagaacagcactatcactatcatgaaccacccccatgattcaattacctaccaccaggtccctcccacaacacatggggattatctgaagtacaattcaagatgagatttcggtggggacatggccaaaccatatcattttacctgtctcctcccaaatctcatgtcctcacatttcaaaatacaatcatgtccttccaacagtcccccagagtcttaacttattttagcattaactcaaatgttcaagtccaaagtatcatctcagacaaggcaagtcccttccacctatgagcctgtagaatcaaaagcaagttagttacttcctatatacaatgtgagtacaggcatggggtaaatacaccttttccaaatgggagaaattgaccaaaacaaaggggctacaggccccctgtaagtccaaaactcaatgggggcagtcattaaaccttaaagttccaaaatgatctcttttgactccatgtctcaygtccatgtcacactcatgcaagaggtgagctcccagagccttgagcagctccccccctgtggctttgcagggtacagccttcctccaggcctccttcatggctgatgttgagtgtctgtggcttttcccggtgcatggtgcaagctgtcggtggatgtactattctgggttcaggagaacaatggccctcttctcacagctccacagtgccctagtggggactctgtgtgggggcttgtaccccacatttcccttccacactgccctagcaaaggttctccattagggttctgcccctgcagcaaacttctgcttggacatccaggcatctccatacatcctcagaaatctaggcagaggttcctcaacctcagttcttgatttctatgcacccacaggcccaacatcacatgtaagccaccaaggcttggggcttgcaccctctgaagcaatggcctaagctatatgttgaccccttttagccatggctgggacacagagcatcaagtcccaagactgcacaaagctgcaaggccctgggcccacaaaaccattatttcctcctaggcctccgggcctgtgatgggagaggctgccatgaagatctctgacatgcactggtgacattttccccattgtcttggtgattaacatttggatcctcattacttatgcaaatttctgcagcctgcttgaatttctcctcaggaatgggtttttcttttctattgtattgtcgggctacaaatttttcaaacttttatgctctgcttcccttttaaacacaagttcccattccaaactatctttctcaagtttaaaattccaccaacctctagggcaggggcaaaatgctgccagtctttttgctaaagtataacaagagtgaccttttctccagttcccaagaagtttgtcatctccttccgagaacacctcagcttggacttcattgtccttatcactgtcaccattttggtaaaagccattcaacaagtctttagggagttccaaactttcccacctcttcctgtcttctgagcccccaagtctctagaaagttccaaactttccgacattttcctgtcttcttctgagccctctaaactgttctaacctctgcctgttaaccagttccaaagttgcttccacattttcaggtatccttatggcagcaccccacttccagtaccaatttactgtattagtttgttctcatgctgccatcaggacatacctgagactggataatttataaaggaaagaagtttaactgactcagttgagcctggctggggaggcctcaggaaattacagtcatggcagaaggggaagcaaacatgtccttcttcacatggtggcaggaaggagaatgagtgagagcaaagtgggggaaagccctttacaaaaccatcagatctcgtgagaactcactatgatgagaacctcccccatgattcaattacctcccactgggtctctcccatggcacatggggattatgggaactacgattcaagatgagatttgggtggggacacaagccatatcactacttttctttcaaaaaaagtcttagggttattcttatacatttttcttcccattgaactttagaattatccaaaaaaaaaaaaccaaaccaaatttatactgggattttaatgagaattgttttaagtttatatattaatttgggaacgattgacattttcccaaactctaggtctatttccccaacccctacccctacccctagctttattgaagtataatcaacaaataaaaatggtacatatttaaggtgtgcaacatgatgatttgatatacgttatgaaatgattgttacaatcaccttacatagttaatttttttttcttttggttgggagaacacttaagatctactcccttagctaatttcaagtacacagtacagtattatcagccatatttaccatgctgtacattaggtcctcataacttcatcttgtaactgaaaacttttaccctttgactgacatcttatttctactctctgcttctagtagtttgacttttttagattccacttataagtgagatcatacagtatttatctagatagttttattcattttttttgcatcttttagcaaagttttttgcttctcatataaatcttacacttcaatatatatctgagtgtctagttactttattaaatttatggttgtgacctggatctcataatatttttatttaaaatttattattttattggtttttgtttacatttacttctctttmtcaagtctaatttttcaaagtttctaattaatttctattttcatctttattcatttttttcatttgtctaagatctgtagaaaagtaatactaaaaaaatttccaagtggttctttttaaaattttttcatttagttatctttttattgctgattgctgttttgctctattgttattggggagtatagtctgtatgttttctgcttcttaaaatttcaacagtttgggggtacaggtgaattttttgttacacagatgagttctttagtggtgaattctgagatttttagtgcacccatcacctgagcagtgtacactgtacccaatatgtagtcttttatccttcatctccctcccaacctcccctcatcgagtcctcagagttcattatatcactctgtatgtctttttgtccttagcttccacttacaagggaggacatacggtttttgcttttccattcctgagttacttcacttagaaaactggcctccagctccatccaaggtgctgcaaaagacattatttcattccttaatatagctgagtgatattctgtggtgtatatataccacattttctttatacacttgttggttgatgggcacttaggttggttccatatctttgtagttgtgaattgtgctgctataaacgtgtgtgcatgtgtctttttcataaaatgacttcttttcctttgggagatacccagtagtgggactgctggatcacctggtagatctacttttagttctttgaggactcttcatacagttttccatagaggttgtactaatttacattcccaccagcagtgtaagagtgtccctttttcaacacatccatgccaacatctattgttttttgactttttaatcatgrtcattcttgcagtagtgaggtggtatttytttgtggttttaatttgcatttccctcattattagtgatgttgagcaatttttatgtatttgttggctgtttgtatatcttctttagagaaatatctgttcatgtgctttgcccactttttttttcttctttttatttatttattttttattatacatgtgcacatcgtgcaggttagttacatatgtatacatgtgccatgctggtgcgctgcacccactaactcgtcatctagcattaggtatatctcccaatgctatccctcccccctccccccaccccacgacagtcctcagagtgtgatattccccttcctgtgtccatgtgatctcattgttcaattcccacctatgagtgagaatatgcggtgtttggttttttgttcttgcgatagtttactgagaatgatgatttccaatttcatccatgtccctacaaaggacatgaactcatcattttttatggctgcatagtattccatggtgtatatgtgccacattttcttaatccagtctatcattgttggacatttgsgttggttccaagtctttgctattgtgaataatgccrcaataaacatacgtgtgcatgtgtctttatagcagcatgatttatagtcctttgggtatatacccagtaatgggatggctgggtcaaatggtatttctagttctagatccctgaggaatcgccacactgacttccacaatggttgaactagtttacagtcccaccaacagtgtaaaagtgtcctatttctccacatcctctccagcacctgttgtttcctgactttttaatgattgccgttctaactgcaawggtatctcattgtggttttgatttgcatttctctgacggccagtgatgatgagcattttttcatgtgttttttggctgcatagatgtcttcttttgagaagtgtctgttcatgtccttcgcccactttttgatggggttgtttgtttttttcttgtaaatttgtttgagttcactgtagattctggatattagccctttgtcagatgggtaggttgcgaaaattttcggtgtggatgtcctttctgtttgttagttttccttctaagagacaggaccctcagctgcaggtctgttggaataccctgccgtgtgaggtgtcagtctgcccccgctggggggtgcctcccagttaggctgctcgggggtcaggggccagggacccacttgaagaggcagtctgcctgttctcagatctccagctgcttgctgggagaaccactgctctcttcaaagctgtcagacagggacatttaagtctgcagaggttactgctgtctttttgtttgtctgtgccctgcccccagaggtggagcctacagaggcaggcaggcctccttgagctgtggtgggctccacccagttggggcttcccggctgctttgtttacctaagcaagcctgggcaatggcgggcgcccctcccccagcctcgctgcctccttgcagtttgatctcagactgctgtgctagcaatcagcgagattccatgggcgtaggaccctccgagccaggtgtgggatataatctcgtggtgcgccgttttttaagcctgtctgaaaagcgcaatattcgggtgggagtgacccgattttccaggtgcttccgtcaccactttctttgactcgcaaagggacctccctgaccccttgcgcttcccaagtgaggcaatgcctcgccctgcttcggctcgcgcatggtgcgcgcacccactggcctgcrcccactgtctggcactccctagtgagatgaacccggtacctcagatggaaatgcagaaatcacccgtcttctgtgtcactcatgctgrgagctgtagaccggagctgttcctattcggccatcttggctcctcctctttgcccactttttaatgagtttttttttttcttgctgatttgtttgagttccttgtagattctggatgctagtcctttgacagatgcatggtttttgaatattttctcccactctgtgggttttctgtttactctgatgattatttcttttgctgtacagaagttttttaatttaaatagatcccatttatttatttttgtttttgctgcacttgcttttggggtcttaggaatactttgcctaagccaatatccagaagagtttttccaatgttatcttccaggatttttatggtttcaggttttagatttaagtctttcatctatcttgagttgattttttatgagagatggggatccattgtcattctgctttgccaaagatcagttggcagtaaatatttggctttacttctgggttctttattctgttccagtggtctaagtgcctatttttacatcagtaccatgctgtttgggtaactatagccctgtagtataatttgaagtcctgtaatgcgatacctccagatgtgttctttttgcttagtcttgctttggctatgcgggctctttttttgttccatatgaattttaggattttttttctagttctgtgaaaaaatgatgatggtattttgatggaaattgcattgaatgtgtagattgctttgggcagtatgatcattttcacaatatcgattcttcccgtccatgagcatgggatgtgtttccatttgtttgtgtcatctgtgatttctttcagcagcgttttgtagttttccttgtagagatcttctgccttcttggttaagtatattcctaggtgttttatttttttgcggctgttgtaaaagtgattgagttgctgatttggttctcagcttggtcattgttggtgtatagyagtgctactgatttgtgtacattgatttggtaactgtagactttactgaattcacttatcagatccaggggccttttggatgcatctttaggattttttgtacgatcatatcatcagtgaacagcaacacttttacttcctcttttccaatttggatggcctttatttctttctcttgtctgattagtcttgtgaggacttccagtactatgttgaatagaagtggtaaaagttgccttgttctagttctcaggggaaatcctttcaacttttcccattcaatatgatgttggctgtgggtttgtcatatatggcttttattactttaaggtagtcccttctgtgcctgtgttttctgcttttgggatgttgtatcaaagtttgctttctgggtagtaacctaattaatatttgtaaatagactttgggcataagaaaaaactattttctgtagggsacaaaggtattttctgtatagctctatagctttgatctccatagcagcacctcgttgtattgctgtttaacgtgttatgctaatagagactgtgagtggactcaaaacgaccagtgacagcatcataccagattcaaaagactatctcaaataactgagatggtactgaagatgatgtactctggaaaacagttgactgaaaaagtagatggaagatggcatctgagctagcctgcgtgggtccgaatcccagttctgccacttatcagttgtgtgaccttgagcgagttatgtaatctccatttgcctcagaaatttcatcttagaaatggaagtaacagtagtacatacctcagagggaaagctgttgtgcttagagcaatgctttgcgtgtagtaaatacatgtgtttattattatgtttttttttttttttttgagatggagtctctctctgtcacccaggctggagtgcagtggcacgatctcggcttactgcaagctctgcctcccaggttcacaccattctcctgcctcagcctcccaagcagctgggactacaggcgcctgccaccacacccggctaattttttgtatttttagtagagatgggatttcaccatgttagccaggatggtctcgatctcctgaccttgtgatccgcccccctcggcctcccaaagtgctgggattacaggcgtgagccrccgtgcccagcctgttatatcttttttttaaaaaaataaaggctgatgttgaaggtgcatgtggaagggttttgtttcctgaaaaacgaaaatgaataaaagcaagagttctaagtcagtgtattttctgtcattgggattttgaacatttttatctctaaattaatgttatatgatgtgtgacaattaaatgtcacatgtaggcatttgattatgtcatctaagtgcctgcatttgcaatgtatagtattcagattgcccaaaaaactttgtatttttggatcttctgtttggaaaaatagatgattaccttatatttgaagtcacattttctctactcatttaaaaaataatggttcgtaaagttgtttagcaaggttggaaacagtttgtaaagtcaaaaaatcagtatacagtttcatgttacaaggaagtgcttataactgcaaaaaagttaaaaacaatacctgatactagaaggttgattaagttatgctacattgacacagtggtataatacggagctgtgaaagaataatggcttgtatctgtattaattgcacggaaaccttcatttcaatgtatgtggctaacttttttccctagtttccagttttttttttggtaatatcagccttgtgttgcatttgtctgttgatgtctctatattgtgcactaaattatacaccactttaggccagggaatgagtaatatatttcttatatccccagcattggtacacagatgatttgtagtaggaacttaataacgaacaaatgtctattgtgtgttggattgtgtctgagttggatgtttgtccttgttttaggaatgctaactatgaaataaaacaatgataaatatgctatctacaattttttctttactatggaaccaaaatattccatgttatcatgtgatattgttaaaattattatcagactttctctgtgtgtactttgaagaaaaacagtaatagcaaaattaggctggtttaggaaggatttaatttaaatataaggagatttctcagggacagtactcaaatagtagagtaggttaaggaaggaaaatatagaattggtttctctagaacatgcagaaattacctttagttagcaatttttgcatacctttacctacatttcataatgttgcagccttcttcacctttttagacatgcttaactttttctgttgttttggatataaaaaataaataatatataaatatgaagttgttaaaaaaacaraattataatagacatgtacatttttaatgtttgtaatataaccctttggtaagtgactaagtgactaatatgaaatttattttcaaattagtatttcttgctaatatgaaatttcatgctaatatgaaatttattttcctattttccatttccctagagatggaaaaaattaataattccgatgtataggaatataagaggcagcttctctattctttagacttttcttttgtcttttagctttgtactgctgggtgatgcttttcttgccttggccaagtagagccaagtaaaatttgcygaatcccctaaattatttacaagtcataggttgtagaggttcttactttttatagaagcaagtacattatctctgtttttttctcatctcagaagaacggaaatgaatttacttctgtactaagatcttttattagaccacagaaactaaattaaattttccttttcctaacatttaatgttttcagtttctcatttagtatttgaacttgacatactcatattggaaaaagcaaatactgtcaaatcaattgcccacttctagaattcaatttcctttctagcttcaggttcttgttaaatgaaaaaaaacatacactcagtttatgaggacagactgttcagaagcaaattaggataatgtattttgggaattaaatagagctgtggaaagcagaagttgaatttcttatttaagcttctgttgttagaataattcattgaatggaaatacccctaaacaagacatctataatttttttgatgattgattaaaatatgttttctgtatggtttgaaggtttcatttatcaaatgagagacataacaggtttttcatactagtaaaatctaatctcttcaaggaaaaaattctcttcagaagggaattgtggttacattttacattttgaagtcattggttttatttattcagtcaaaacatttaacttggtgagggtaagaacaggagtttatggttatgttaccgattattctagatattaatagttcaaatagtcctgttcagtgataggtataaaaaaaaagttaaagattgaaaagtcaggttactaatcaatgaggatgcagttgcttttttgttactattatttgtaactttatctcgctcctctttatttctcttcatatcatgtaagttggttggagatcagcttattaatcttatttagagaaagggtatgattcaagatgtggtataaaccagagtgaaagaaaatttcagcaactgaggtggacaaacaaaatattttaagatgacaaatttcttgaaagacccaaatgaaatctttaatgcaatctttgattttctgtgaattttaaggaaaaaaatggataagaatgtaaacagaataaattttaaaggaagttcaccccttaagaagggattgaggaaaaaaaagattaaagatttaaaacaaagtagaaatatcttatattcccagaaatgctattttatcaaattgtacaacaaatgagctgagaaagctcagttacaaacatgaatctgaaatattttccttattgctggaacgctgtcctgatgtaatacagttgtaacatggccactttaggaacaacatctcctaaacgtctcctatggatgtgaatcgtagcatgaaagtaacaagacctgagaagcattctcatcatctatttttagatttctccagtaagcaatatttgctattcttgaactgtttttagtgtaacctgttttagtcactgttggcaaaaagaatatttgcataatagactacagacacaagaatgatgtggtgttcttttttttttttttttttaatcttcaaaatggcatggtgtttatttgggaactcaatggcttttataattatttcttctatccctaccatgaaatcaggttgttgaaagtcccatgtaattgagcaaattggttttccattattgatgtaggatgttttgttagtaatgatacaaattttgttctgaaatgttgaaaaatacattgtgtgtgcacgtgtgtgtgtgaaatataaaaatcctttaatgcatatcaagccatctactctgaactaggtttttagaagatcttcaggtttaatcaaattctgcctcttagacttgaattcaaacaaaatactatactattcctattatttcataatcaaaactaaagctaagaaattgtgctttttaattattttttctcactaattaaaatgggatggaatagaaaaaaattattaatattgtaatgttacatacaaaagttatttgaaggccgggtgcagtggctcatgtctgtaatcccagcactttgggaggcagagatgggcagttcgcttgagcttacaagttcaagaccaacctggtcaacatggtgaaaccccgactctgcaaaaaatacaaaaatttgccggacatggtggcatatgcctgtagtcccagctacttgggaggctgaggtaagagaactgcttgcgcctgggagatagagcctgcagtgggccaggatcacatcattgcagtccaccctgggcaatagagctagaccttgtccctcccctgagccccacaaaaaaaaagttgtttgaaaaagatggtttggatcctgaatataagtctgtatatataaagtttataaaacataatcttttgtatttgttgtatttcttttgaaatgcaaaaggtttagaaacaaccactgatttgttcattatattataaaatattaatttaaatacagctgcttttatgggggtatatgcggaaggatttgagtaagaatgtcattttcaattactattcgtttagcaaatatttattaagtacttatgatacttttatgtatgtgtatgtgtgtgcacatacacaggatacacgttctctgccctgtaagagcctaatagttgtgtagacagggtgtacatttatgttagataagtacatgttaactaacaatgcagcaaatgacccaaaacagtatataattaagttctgaataagaaacacagtcaaatgctgtagtttcacaagagggaaagatcattggtggatgcaagaaaacttcataaaggattaaccttagtttggagaagttggatttggagaggtagagtcacttaggaggcatttagttaatgggtgtaggataggcaaaggcagagagtaagagagaatgytgtatttggagagtggtaattataacagctattaagggtgtctatgtgccaggcactgtaaaagtgctttgcatattttaactataacaactctgtgagataggtgcagtttttaactccatttttgctgaagaggaagccgaggcagtaagaaattaaataaattgcccaagatcatataactctttagaaggtaaaactgggcaaccaatccagtgcaacctgacaactcagttaaacctgagattgagttgatgttctagacttgagctgtcttatactgtagccactagccacatgtagttttgagcacttggaatgtgactaggaaaaactgagatgtgctctacatgtaaaacacacatcaccagcctgggcaaaatggcaaggcttcatctctacaaaaaaagagaaaaaaaattagccaggcttggtgatgcacacctgtagtcccagctacttgggaggccaaggtgggaggatcacttgagcctaggagatcgaggctgcagtgagctataattgcaccactgcactccaatctgggtgacagagagaccccttctcaaaactaaactaaactaaaaaaacactcatcagattttgaagagtatatatgaaaaatgaatgtaaaatatctcaccaataattttgcattgattatgcattgaaacaatattctggttgtattctgatcaactatattattaaggttaatttcacctgttgttttttttttttttactttttaatatggctattagttaatttaaaattacataggtagctcatgatatatttctattagacagtgctcttcaagattgcataccagtgaatgaacagtccaactggagtgaaagaatagaagagtgatgacaggcaaaggaaaacaatatttaggattaaattagaccagcacttaggtttatcctttaggtgatccatgcatgcaccatctgcctcaaatttttagggtgggaaaagttgttaaatagagattcctgtatccattgcagacctcctgaaacagaatctctgagagtagagccatctctaaaacttcagtcatccctaactcattattttaatttcttcattgtaaaggttttaaggcctacccatcaaggggggatctgcaggagaaactataacgctggttttatgaagacaattaatgtgaatgctgttttcttaattttctgaccaattttgttagattggactacagtaaaacgaaagacataggcagttgataacagtgtcatttacagaattgctttttggagattgggtggttgctacttatttaataaatagggaaagtaactgtttaaattgccgtataatttgtagtctagtctttcacggaaatgagagccacatagctctggctatgggatttggtgattggtggaatgtttggaatctttacactggatctagactgtcctaaagaagttggctgtcctggtgtccttaattccatgataccttttgttaaattgatttgcctttttaagttataccagagcttagggctttcaaattaccctgtcttataaaagatattgatctatttattcttctaagaaacaatcatggtgagccatttttagcttttttggaagtaattgataataaattaggcaaatcagtcttatttcttcatgatgacgtagagtttgtgaacctcaaggccttatagtaatattccatattaacctaaaacagtacatagttctcaaagttatgttgaacatkgctttggctacctacattcttgaccaatgatcaattaaaaaatactaatgatattgattaaagaataccatccttcttggaaaggttaccagaaggaagtaccgtgcctgaacagaattctttacatgaatggcaattttattagacattcatcagctattttctcaatatatacctttttttttttttctaaagaatgtgcttgacctgcttgcctaacctgaaggcgtaagaaataactttggtaaagtgctgggtttctaacactttttaatagctgaaaattgctgtccactacctccttgcaaatattctcaaatgattttcaataggacataggaggccacaaaaattaaatcactggcactgagtagaaatagccacaaggggcggagcgcagtgtctcatgcctataatcccagcactttgggaggccgaggtgggcggatcacgagttcaggagtttgagaccatcctggccaacatggtgaaacccccgtctctactacaaatacaaaaattagctgggtgtggtggcacatgtctgtaatcccagctattcgggaagctgaggcaggagactcgcttgaaccagggagttggaggttgcagtgaaccgagatggcaccactgcactccagcctggtgacagaacaagactccatgtcaaaataaataaataaaaaataaaaataaatagccacaagggtattgccccactggcaaaacatttcccatttttaaggtgactataatttggaatgcattctctcatagtattataaataggcttagtcttctagagcaacctacaaaaaatatcttaaacttagctgaataatagtgctgtttcaccttcctttatcttgacttggttgggaaaaatgtattcctatgrtaatagaagatgcccaattaaattctctttcctttttgttgaaagaagctttccagtcaggggcattgagaatgggtaaaccttcataaacctaaatatcttgtataaagtatttctcaaggtctttcttttcttggaggttctgaattgtggcatagagagatactgggtctctgcaggggtaggaaatccaaattactgctgtcttctatttgcttatatgagtcatttgtgaattgagtcaggtactttttataccaatatggaggagaaataacacactttttatagtttattttatacacattcaacagaggttatgtacacaaactaagctctttgaaggcttatttgcttttatatttccagcacttagcacagttcccagaacataaaagatgtgtttgttgaatgcatgaatgattacagccttcctgaagagtctaaattctgcatggtcttttcgagattgtggtaatttgatatatacattatttttatagcaatttaaaaattgaatcatgaactttatagtaataagctcttttagattctttgctttctaatgtaagagataatacatattctgaaactttaaatgggatagccttgttgcctgccttaaactcacaataagacaattgtttctggtgcaatggaaaaattagcaaaataaagagattgcttaattgaattaaatcgccaaaaaacaagctaattttccaagttaaaaatatctctaaattgcaatatcaagggaatgtttctatttttaaataagaaccttcttacttttggccttaactgtaaactccacttttccctaatcttacccttcatgaggcatagtaggagtacatgtagtctaatacttaggagcatgggttttggaactcagacctgaactcacactgtactctgccacttactcctgtgtgattttggtcgaactacttaaactctccaagaaatctgttttctcattgtaaaatagggacaataaaggatcctgtgatgtttaaatgaactaataatgtctataaagcatttaggcatacagaaatgtttaatacatgttagtcgtcatatacattgcatctttctgcctctttcattcatgttgactttttcccctagcctttctagctactttttaaggactgagtttaagttaactattcattgtatttttttccccatctcttactttctcatccaagttcccattagtagtccattactgcactcaccatatattatggttccatgtttgtctgccttctacagtagatcatgaattcttcaagggcaaggagtatgtttgtacttttctcagctcctactacaggatttgccacatggtgtttaatagagtatttgttaaattgctaattgacttgtatatggaactcttctataaattgtgcaatgttaatcaaatgatagtgctattttaggacttaatatatacctattaggaagtaattatttggcatttaagtacagaagattagactgttactacaaagctaattgaacaatgactccaagtactagactataacaaattctttaatcatctgtatgtaattgatttcagcaacctttaaaacctcgtatataagtgaatctatttgcttcctgctgtaagccatcaggatcagtcccatcttttaaattgttttccccccagaattttaaagctgattgcttaaatatartattttatttagctaaaccttgaccagcattgagaacttggtatgtgtcaggcactgaggactttagtatgctatctggtgtaagtccttacaacaaccctaccagatagaggtagtcatgttttccatgcctttatgattaaaaactaaagtttagatgggtaatttgcactaggtcacagagacagtaagtgctagatcaggatttgaacaagcattcaatactttataygtattacctcaaggccgggcgtggtgatccacgcctgtaatcccaacactttgggaggccaaggtgggtggatcacttgaggtcaggagttcaagaccagcctggccaatatggtgaaaccctgtctctaataaaaatacaaaaatcagccgggcgtggtggcaggtgcctgtagtcccagctactccagagactgaggcaggagaatggcttgaacgcgggaggcagaggttgcagtgagccaagattgcgctattgtactctagcctggacagcagagtgagactccatctcaaaaaaaaaacacatacactttatatgtattgcctcaaattaaatttttaaagatgataaagttcaaataaaacttaggcagcgtgattctggggcctaaagttttatttgtactttattaatgcatacaaagtatctcatgcttgtctcagagtagttgttcaaaaatgatagctttttctcttctgataaattaaaagatgactatgtaaaaaccagtcacctggaccttgtaagggaacatactgtccaaacctatctgggcttttacattccttgttgcattgttgttgaccgtcttattttcctctgagaggacgatccaacatataagaaatcacagaatatcagaaaagggtgcagaatagtaggtttgtcttgtttcaaaattcagttttattttccattgatgattagtcttatcaaaaagcaagttacttttttaagacatctgtgaaattttaggtgttttttttatcaccgtgtatatttgtccagtatcttgagtaataaacatttgtcatttttagatttttaaaacrtcacctttgcagcttgatttgaatgtgaattaacttgatgtccaatatcttaagatccagataactcacacacaatttcactaataacttgcacacaattttgctaatatataaatttagaaattcagtaggtcaaatattttctgattgttattacatatagcaaaatcctggtataacacagtttacccttattttctttcttaatatcagcattatacaggggtyggttctatgatgtttagaaaaaatgctttaaagatatttaaagccctatatttcatgcaagcattgttcatctttttaaaaacaggtaaatcaacagactgggaagatgatggttggggagcatgggaagaaaatgaaccacaagaacctgtaagtctttacaaatatatgcatgttttttgatagtggcattttccttttgtaatgatggtgacatatttccctgtcaagctgacattttaaattcgatgtcaagaatatttttgtgcttacttattagtacttaactagatacctcttcttaaggaacttaatgacattgtagctaaagcgggtgtcttcgttcacttggtgttgctataacagaatacctgagactgggtagttcataatgaacagaaattgattggctcacagttctggatgttgggaagtccaggatcaggggccagcatctggcaagagccttcttgctgcatcataatacggtgaaggtgataggaccagaggctggtggagagggtgggagggaagaaaacatgggccaatactcctctttttataacaaattcactcccacaataaggaacctactccctcattaacgtccttaatctattcactctgctctcatgacctaattacctctcattaggccccatttcccaacactgttgcattggggattaaactttcaacacatgttttttgggggcacattcaaaccatagcagtgggctaaatggagaataattgttttaggattctttatctttcataaattattcttttatattctttcactattcactcaaatatttgctgtacctaccatattctacgcatttttctagatgctgggagtatagcaaggaacaaggcagacaaagttcctatatatgttagtatattttcacatatgagtaataaaaaaatctaactttaattggcttaaatatgaagaaaatttattcgcttacatagaaggaagtccaaagatagaatggaatcctgggttggttgatcaggcaattcaaatatgtcaagttatttcattctgtctactttgtatatgcagtgttggcttcatcctaatgcctgtttcattcacagatgtagtgtggacaacatgtttcttcattaatgggtagagggagaaaaagacttgggcttttcatgactctttcaggagttaggragctactttcttagacgtctctagcaaacttttccttatgtcttcttggccaggattgggccacatgctcatttctgaactaatcactggcaagggatatgagatattcattgttgaatcatattattccctggagttagaggataagagggtcagcttctcctgaggcccatggccacacggaaggagttgatacctgaacaaaatcaggattttttttttaagaaagaagaatgaatattagataggtcttcttacagtcctatttctgggagcttacactctatgagagggagacataaaaaagaaagatggatgaaaaataattcaaatggtaatgtgatagcaagtgactgctatagattgggtggttaaggaagttttttcagaggctgtgacagttaaactgagatctaaaaggcaacagggagtcaacaacatgagaatctgacaggattctaggccagggcagcagctcatgcaaagtctcaaggcaggaatgggcttgagagtttgaagggacataaagaaggccagtgtgatgtagcaggactgagactgttccaagatggggcagagaagaaagcaggccagatgtcaagctttgtgaatttggtgtttattctaaatgcaatggaaaaccacacttacctgatttctgactttgacagctcaccttggctgctctatggaataggttgaagtagggagcaaaagtagaagcaggaagaccaattacaaggctgttgcagtagcttagttgagagatgattgtggctttgattaaggtggtattagtgaagatgagaaatggatgaattctggataattttcagaggtaatgataagactttccagtgagctggttatgaaggatgagaggaaggtgataaatcaataataaattctttgatctggggtgtggtgtgaaatagataaaacacgattgttgaaaggttgatattctcaaaaggtgagtaatagatgccattctctttacttttgttaatatttttaaatatccataataagaagtttttaaaaaaccctgccagatatttggcttgaataactggagggatgttgtgtcatacccagttggggaggatgaggaaaagaacagctttggcagagaaatcagagagcatcatgtgctaagaagtagagatatgctcatgtaatagagatgtatggaaaaactccatgaggagattaagaacaggaaaccatttcagaagacctctaggagaattaggatgtgttgaataggataaaatgcagctcagggaatttggttactgcagcacctccgcgaacaacacctggtcctctttctaatgctatgtcaaaatggagcctcagctattctgcttttcctaagactgactggttgctgcttactccggatttaaactattgcatggcttttgctatgtctcttgtttgtggttgtcttagattatttctccttctttgtttcacattcagagctcatgtgaagattttactgagtctgtggattacaacctaatataggatatttggggagggggacatactgtttacaccaggccacttcatgggacatcagcagctatattattgctgcctcctggtcaggcattcatcagcagtttaattcgctatggcaagaatgaggaggggagggaaggaaaggagggggtttgtgtaaacaagcttggagattcttcatgattctaggaaagtaacctttcagaaagggatgtgcttggagaatttcccagaaagagatagtgtaaatggcacttaccttacatgtgctatttggtagacttttagtatttgctttctgaaatcatgtagctaagttaccactatgaataacgtaagagacttccaagtaagtttgaggttttctggaataaacctcacaggcattgcatactaaagtggacacatgcatttataatttcagaagaggttccagtgtgacagttattattacatatatagaatagtgctggtgctgagctatagtataatatttcagacccagatggccacatcttaatgagcccactgatacatacttggctttttctgtaatggatttttgttaatatttgtgaatgacatagttaggcatttgtgtgtgaggcaagttgtccttaaagatatctactaattcttccctgatagtattaattgggttagtttagtcataatgtgccacagacttgctttttggctcatctaaaatgtgccttcctaagggtgtgccgctttatggcattataacctaatgagtagaaaagaaggaaaatgtgctatgcaatggggtcagagaagcaagtaggcctgatataaggctttataaatttggaatttattctaaacatgatcagaaaccacattatctgatttctggtttttcaagctcaccttggctgctctgtggaatagatgcagttagttttccttgtatttttttcttaattagctatattattcttttattttcttcttaattagctgtatttctcatactcatgagggtcgtgtgcctctttattttgcagtatttcattttgatgtgccactattgcagctgattctgagtgacgtggacaatgatagcatagttagaatgcataagtgttaacacatttcctttatatctgacctgtaaagcatgtcttcttttttcrgcaaggatatactaaatctagggataacctaaatcgagggatctccagggataaatgtaaggatcttttaaacaatgtagttaaaagctgaaagatgcttctactcattctaaaaacacataaaaatactgacatgtagaacatttcttcatttggataaaatcggaatatttacaaatggccctaatggatgagagtagcttggtgttctttgtcttgatagatttgctcatactgtgacttgacaaacacagcaagtgaaaattgttgatagacctcattcacaaccattttgggtgtaccaattatttctagctgttcttattatccatttttgaacccctgtaccttgtcatgggtcatgtgtacatggtgagggagaatgcatttgggtgacagtaaaggtaggcaggtacaatgaagttcagaggttatctagttgttcaagttatcctggttgttcaagagagcctctttgaatttggatcctttccttaaaagacatctttgctaaaggagactggtgggtgggaacaaaaacggcactatggtcagggtaaggactgtgacctctcccttgaacagcagcatcaaccagaactttccatatatagcactattatgaagttttgctgagcaaaatgttttataccaggactattagaaatctactcagctgaagtaagagactcttatttctactaccatctatgattatgaacaactccagaactataaccagctccagaggcaagaattagaataaattttggcagatgtgtgaaatgtaaaagtatatgctctagttgcctagttagaatgtaaaggagtggaaagagaaccttttactctctcttattaggaacagataccaagctcaaaacctacctcctctgagagtctgagtcttatccacattaaagaaggaaccaggtttggaagaagtggaatgtcttgaagtcaacttacagtgtgtcaaggcgttataattataaaaacaattatagaggccaggcgcggtggctcacgcctgtaatcccagcactttggaaggctgaggcggtcagatcacttgaggtcaggagtacgagaccagtctggccaacgtggcaaaaccctgtctctaactaaaaatacaaaaattggccaggtgtgttggcacatgcctgtaatcccagctactttggagactaagggaggagaactgcttgaacccgggaggcggatgttgcagtgagccgagattacaccactgcactccagcctgagcaacagagtaagactctgtctccaaacaaacagacaaacaaacaaaaaacaattataggattctccaccagttgccattggtttgaggttattataaccagaagagggtaaacttttcttctgcattagtcgggtgttacggagatggtgtgttttgctcttcaggagtgctgcagtagtgtgtagataagccacaggaggggaagcaaagaggaaaggagcagcagccactgccacagaatgctgacatggaggccaactggctgctactgagttcggcaaaaacactaaaaactccacagtgctttttatctccaygagtgtgttagctctttgagagtagtttcttatttttatggcagaaaatgacttttatgttcagagtgacagtactgggatctggacaaggcttttttaggaaaggagaaagcctctttttttctgactctaggttgattctgattctgatttataggtgttagctataataatggcttagtgaagaaagcatattttaatatacactatcggccrtagccaactatgtccaaggaagtgtacatctatgacactggtaggcttaggagctttaaatagtttctgtgacagaagaccaacatctttctgctatagctatttcatgtctgtattcatctgctcaggctgccataacagtgtaccacacgctaggtgacttaaacaacaaaaacttattttttcgcagttctggagactagaagtctaagatcaaggtgccatcggggctgatttctggtgaggcctttcttcctggcttgcagacaactgctttcttgctgtgtcctcatttggcctttcttctatgtacacatgctgggagggaaagagtgagttctggtgtctcttcctcttatgaggacaccagtcctatccaactcttatgagctcatttgcatttaacctaaattacctccttaaaggccctatgtccaaccaagtacagtcactttagggttaaggcatcaacatatgaattggggtgggggcaaggggacacaagtcagtacattggcaagtgtactgaattgggcaagtgacaaaagtaaggttaaggaatttcaacttgcctataagtaaatacaataagagactgaaaaggcaagcagaacaaacttttaaaatggattgggatagaagaaagatggattgggatagaagaaaaggtaaaacaaagatcttcctctatactaacttgattttaagtgacatgatgacaagatagtggctggcttggggacattggaaaagaaggtagatgccatctgctgactgatgatcctataacaaatagtaaatagctttgctggtttttttttttttaagagtattataaaggcttttagttggtattacaatttttttgctatgagaaagaagtaattagaggagaatattttgttcagccttatgctgtaaagggaattgaggcagtttgggaagaagcttgaaaggcttaatttaatttcatggcaagactgatttaatggactttccttcattggtgtattaaggccaatggtaggaagtatagacttggggatttgctcaatagtaaacagctagtggttaataggtggtaaatgggtagtggttactggatcaggaatcacaggaaggttctgggtcaaggtcttcagttaaggtaggcagcatggaaaatttccattcaaaagagcctttgaaatgtgctccatctgttttacagaaactgttataacagtttagagaggcaattatgatttagcagattaacagggtgctggtcagatggaggccccagagaattgtttgtttacaggctgagaagtggaatatagcacgacctgattggagattcctagaacattaataatctgggatgatactggaaaatgttttgccttatttcattattttcagtagactctcatgccacctgccacacaggagacatgagcatcagactgaccagaggcggaagaagaacacttacaccataaggatatgccctaggttatcctctgaggctgggcaagggtctcctcattaggctgtttcttattaggactttggactttggattgttagaaacactcattttgctgaagatcttcctctctacattaatacaagcttagtctagcctagtgattctcaaccatgggtgatttttgcctcctcagtggatatttagcaatgatttggcatcatctagagacatttttggctttcacagcttgaggggggtgcatctagtgagtagaggccaataattctgctaagcatctttcaatgcacagaacaaaggattttctggccccagatgtcaatagcgctgatattgagagaccttggtttatttagcccatggctcttaatgtaaccctcccagtctgtcttttttgccttttccccattttgttctccaaaacttcttgaccttcagagcatttgatctataagatcattaatttaattttagtagagtttggtgaagtgatttgctgttgtgaaaagtgcagctaagtaattgccaggaaacaaaagttaatttaagttcttcttggatctttggccagagcaacaagttgtctargcttggtctctgtggcattatttatgcctaaatgcttaagctccatgtagtcagctgcaccttttcctttctcttgtttataactgttaattttagttcaaatctgcgctccttargcattcctgcagagtagcttctgttaagtgagttttggtttggtgattggggcctctggtcttctaccagggatctggctgggtggtgtggggaaagggagcctgggacctgactactggttaaacacacttgcaaccaagcctcctgcttttagccccatccatacctttacttctagggggacctggtgccaattcctaaggctgctggtgattttgcaatgcaactagggcagcttctcagctttcttctccatcagtttaggagttagctttctaggaactgtaaactcagtgaccacctgttcctttgttttctagctctcacattttgtgccttttctccttgattttgttcatttgttttttggaggaaagtttttttgtccttactggttttgcctttaaaaagaattcttttactgttgttcttactggtgctagggagactgagagtaaaattcatgtgtttaatttaccctgtttacctagagaccaaatagactttaattttacacattattctactccttgctttttctatttaatgtaatttggaggtttttccatatatgtaaattatttcattcttttcaaggaatactattttattgtatagctgtactgtgatttatttaatcacgcttctgctgaagggcatctagttttcctttgccctttttcttttcttttttcctataatgagcaatgctgcaataagtacctttatgtctgccattcatctttggtttcatgttggcacatagtgtcataattgagagtccgactgcctgaatttctgtcccaactctgccacttactaattatgaaaccctgggcaagttatttaacttttctaagttcagttacctcatttctaaagtgatattgataacaataccaaactcatagtattgccatgaggattaaatgatatatgcttagaatagtacctggagcatagtaagtgctcaataaatgttagctagccttattccatcagaataaattcaaaagatatatacattttcctcttttttttttttttttttttttgagatagggtcttgctttgtcacccaggttggagtgcagtggcacgatcatggctcacttcagcctcgacctcccaggcctctaatttttcagtttttttttttttacagatggggtcttaccatgttgcccaggctggattttacattttgacagaaattgttgcatggtgcttctaaagggctagccaatttgtattccaaatagcagtgtatgagagtacctttctttacttgttgtttacagaaataaaaacagctctgagccagttgcttattatcattggctgtgtgctattgttttttttttttaagtgaaatatttctctccacccatgtttttaacaaatattgtattgggaaacaagactgtgagagatgaatgcgcttttctcttgctgttctcaggtatttgaaattgttgactcctagtatgttatcatactttagtctttgctaaaccagatcaacgtaaaatgccatttcagtgttttaatctatattttaaattaatgggtaaagtttgtcattctttcatatgtttttcacttataattcttttggggaacgcataccattatcttattttttttctaaactccaatagcagtttaaggttcattgcacttactttagctattaaatctattctgatttatattgagtgagagttatttcttatttactagtattgtttatccaactagatgatagtttctgagcaggaatttttttgtcactttcttttactccatgacacctagatttagtatgtagtattaaacagttgtggtcagacaaagtgacatgtgcctgcctatagtcccacctactcaggggctgaggtgggaggattgcttgagcccaggaggtagaggctgcagtgagctgtgattgcaccattgcactgcactccagcctgggcgtcagagcgagacgctgactcaaaaaaacaaaaacaaaacaaagcaaataaacagttgttcaggcaatagagaagtatacatttagttttggagttccattgtaattgtttatgaaatgaattttgtatgagtaataaaatatatttgacacatgtttattatagaaaattcaagtattacagaaaaataaaaataataaaataacccatccctaacatctaaaaatgatcatcattattaactttcaggggttctgcatggctctacacaaataaaggggtttttgggggtttttctttggcactatatgaatagaaggttgagtgggcagatgaatgggcacaaagaacattttatgaaaatgagatcatattatatatacaattgaagaataaatggcagaattaatcctacttgaattgacagttgaagtaaataagagttactgagttagagttaagttcctctaatgctagaaagaaaggtaatttttaaaattgagattgaagttatagtttttttgtgattaatttatttgtgagaattcctttgggccccttcaaatcaaatttagaaagagttcatgtctttccttatgttgaaaagatctcaggatctttcatttgagaattttagtctctgatctgaaatgtggcctagactagtacttttcatgctatgtgtgagagagctctagggttctacagaggtgctgtgtagcttcctcatttgtgcttttatctatttcatatattgaatttttgtaaaaaattttgtttgggagtacaaagttctgctatctaaaaaaagaaagtttgaaaaatattgagcattttatagttagtagcagaatagaaaaaaaaagaaaaaatccttagtaactagtaatatagtgatgtttactttctttttgtgtttcaaaattgctgaagcactatgtgtcttgctttaaaagtatagatgaatattttatttctatggcttaggcagaaagctgctgagaattacagagaatgtgctgacagcccttagattacactggatcttactggtaccactaaaatgtgtaaatatctgtgaaagttagcaaaatgacagtaacaacataaattgcaaatgatggacttatcgtactaaagttgaaagctttgaaaaaccactcctggctacttcagtgactacgtaagtactacaatagctgaaaaaccaaaaaacactggccactgtgtttacccagtaattaccagtccctataatgccagctatagttgaaagactgatttaattactacaattttattgtctgcctgcattgtgtgcttaaaatcaaaagaaagaaaatttttaaagtatatgctctatcccatattgcgttgtttagaaagaattcctttccataatgcacattagtggcttctgtatttttgtagattaagaaaacttttttactggtcttaattcaaaaaaaattcttgaagtttaggccatactaaaatataattatagattccctcccctcaacaactaggattatgttttataggtgcattcattcattcattcatttttgcctttataaaagcaagttttattgttatttaccatagtagtgtcagaaagaggaacagattagctcagtccaacatgattggcagctggcaaaatctagtgaagcaggtgttctgattgctttaatttgggggatttaatttggttgcttttaatacttagccatctaacacttcaaacgtaatgcagaataaatatttcatctccttcctttttactttaacaccacacccacctcacttcaatatggaaatatcttcattaaatatgatttccaaaagaacaagttccctggagaatatagccatgaggacagtgcataaaaagaaaaactcgaaataaaaccctgtatgataattttctattctaagaaaacaaaagtttccagtatatgaagaaataaacccagtctcagatgcactaatatgtctgtgagaagcggttgtggtataataactgaaaactgccagctattttcaagatactcaagtggtaatggtgcacctagcccagcagcagccctcagaagaagccagggtgctctctccacgtaggccagtgtgttagtccattttcatgctgctgataaagacatacctgagactgggcaatttacaaaagaaagaggtttattggacttacacttccacgtggctggggaggcctcacaatcatggtggaaggtgaaagccatgtctcacatggcgacagacaagagaagagagcttgtgcagggaaactcccctttttaaaaccatcggaacttgtgagactcattcactatcagaacagggcaggagagacccacctccataattcagttacctcccaccggcttcttcccacaacacgtgggaattgtgggaattacaattcaaaatgaaatttgagtggggacacagccaaaccatatcagccaggtacaaaaaatccatcttcagcttttgcctcctaaagctgtcccatggttgggctgcactgtcttatccacaaacgggacagaggccttttcagcagcaagctggatcctactcgtgatgatgcacatggactgagccactggaataccaggtggcaccaaggacttctacttatcakggtcagcggtctgagagcctggactttttcataattgctggaactggctgggctattttgtgcggatcttcggggactccactcacctgcgttccaggagcgagactctctgaacacccacttcacagtggcagggaagggacgggctggctctcagagccatggagcttagcgcagccaccacaacgacgatgatgggggagactgcaggcaaattcagtgtcaactttagtaacagggtgggggaggcaagttttggtggaaaacccaaggtccctggtggagcacctttaagcagtgaggtgctttttttgttttacatttcaggcgtggcttgggaaattaccttgtcaaatgatattatttttggatcactagcttcaaaggggcagtgttagagactgtgggccccattattggggaagttttccaaaacgctaattagtaggcaaatgcccttatgacacaaaacaaaatgatgagcttgcatcttgtcagccactgaatgtgtgctgatgctctattaggcttcccagagcattgttgtttacagccctatttcttgcctgagctttctggaactggcgctggaaatcatattttgttgtaaaacctaatactagctcattgtgatccagcctagagagggcatttcctaatctccactataccaatattttcatcaagttatttgtgcttagacttgagacttccctgaaaaatctggcactggagtcacttcagatggactcacactctttattcttggtttgtatttctgcagcccttctggagcaatactgtggcagtgttgtacaggatacattaaagcagagagagagagatatgagaacatcgagggtctagtctttctcatggattctgacccacaggccatttcctcattcttcctcagacccctgattttagaagtgaaggaccagagttcctctgtaaattgtccagggactgtgtgaatgtatgttgctttaaatgtattatctatagtattggcatggttagtgaaaatccacttattctttttagagcttgatttcttttctggaaaaggaggaatttcactcaaatgatccctgtagttccttctgtttctgttaagattgaatcatcctgtcagttggcttcaagaggattatgacatgtgtaagaaggagattgttgatctgtacagacaagcagttctaggatctttgcttacattgtcttgcacttagtactacagtttcttaatttgtagatttattaaaagaaatttgatttacctgaggatttctcccatccacacctccagcagttttctgttttgaatttgcttcataatatggtaaaatttactctggctgggggcaaaatattatagctaagcttaaaacaatacatttttacctctttataattttaaggatattatttggtttgggttattgtcattagaggctttttgtccttgtattgaatctgatatgttgaatactgtgccttagtcacaaagaagttactttagaattacatgtgaccaggagcttgcagttggaataggtatacagctgctcccccgtgtggttgtggatccaaagagcttgtggagcttgtattaagagcacaacaccattgcattttgtgacaagttagcatcgttcttttttttttttaaattatactttaagttctagggtacatgtgcacaacgtgcaggtttgttacatatgtatacatgtgccattttggtgtgctgcacccattaactcgtcatttacattagatatatctcctaatgctatccctcccctgactccacaccccacgacaggccctggtgtgtgatgttccccaccctgtgtccaagtgttctcattgttcaattcccatctatgagtgagaatgtgcagtgtttggttttctgtccttgcgatagtttgctcagaatgatgtgacaagttagcatcattcttgagaagcacaactaaaagtttagatctagaattttatggcacttcaaactctaatgatgatataataatattatcgtattttctaacctatttttataatatgtaatgctcagttgtacatatccaactttaccatggcaaactgggaggatatatttttagtaccacagtaacagagaaagttggagaagtagaaaggacatagaaaataaactgcagtaaagaatgatggaagattttggctttttgcttctttattcccccgtcttcagtggatgaaaccggaataaaaatccacatcaagttttattctcaagtttcatgtaaataaaaatgtacatgtataagatggctaagcaggttagggatatcataattgattatggaatcatttttctgaatttgcttccaagcaagtgacatctatttccaatgcttttgtcatgggtagtccttttgggacaaaattcatgtttgcttctgagatcacttatagtccatttgttggggtagcagcagcttgatcataatctgacaccgagttttaggcccaactaagaagactatgatacagtggtattctgttcttatatctctttaacttgtacttaccatgaatatgtcagccagaatcttgaactattaaatcttagtattacttaagaaaaaacattactaaggactgaatatactagctttaggttgattgttcattgttatacagtttcaggtgtaagaatagataatatattatttaagagatagggaatgctgttatttactcctatattctattagtggactgtgctacatgtggaggtgaaaaataatataagccataggctttgccaacagagggcgtctcatctagtgtgggagaaatgcagtcacagaataaacaggtagcagggagtagtaagacttttaattgcagtaagtttgaaagaaggttaggagtcaggataggatgggtttgccagaggaactggaacttctgatggaaaaacagaaaggagagggaaagtatttttaaaggagttcttgaagaaatacctcaagaatactctggctcacatattcaaatacagtggtcatcttgtagctgtaaatcgactcaaagaactacagaaagattaggccggaataaagtgacaatacagtagttcttttggagaaaagggttttcactgaatatgagattagagtcaaatctcaagtaaagacaagcttccaaagagctagtacagctacccacagagatgagcagggtgatagagtggaaagaccacctgaattaggaattaggaagcctagattttagtttgggctctgacactaattctatggctggagcacatcccttaacctctccgagactccattttctttattataaaattagaatttggaccagttggcctctaaatgtcttccatctttgactctttgtcttttctgtgcacataaacatcagatctaatccttgttagtggcattattttgaaaacatgggacagaaacataggaacaatattctttattgaaaaaaaaaagaaaagcaacttttataatatttttaggatttactgattaaacatagttttggaagtgtgataagaggaaggaatctatttgtatagatgctcaattattaaaacaaatttttttgagaacatgcccaaataagggctgtattcctttcctgaagcattatattgattcttttttattgcattgagatggagattttaggataagagtcagagaccaatcaaagagttttggaccctcctaatttcttatcaaaagcaatgcctaaataatattcctatataagctgtcctcttctaagctcctacctgaaagtggatctctaatcacttagaaggtcctgtgcctcacagttggtataattggagtctcagttgttggaggaaaccatcgggtaatgttgtcctcagcttacagcaagccatcatgaggagtgatgtgttgggtaaacaaagactatcctacagcagaagttgtggaaccagggaaaaatttaattacaactaagttttaccttcataacttttatctttgggggataattttctaatttatctgtagaaaaacaaacattaaaaacaacaagctagatacagaattccttaagaaaagtagagctttaataaaatgagattttgccaatgttatgttctccctatctttcgggagatggtgcagcctccttagcttattttgcttgagaaaaaagttccaaatctgtttgtttcctaatatcccattgcaaaagaaaaataattgcatgactgtcccagaggtttcaggctcattttggggtatttctaaagattccctgtaacccatattttttttgtgttttaaacatttctttgatggtatcccagcaagaaataatttattcctggaaatatgatactactgtaacatttctgactaggatgattttctgtttctaaaatcttttaaattttataatgcttgtaatgcatgcttattacaagtttttaaaaagcatgaaattataatttttttataaaaggaaattaacctgcatagctttcccctccctttccctccccttttcaataattgaatctaaaagacattaggtagggctgagtaaggtaggagtctacatgacatcaaacccagaagctgtaagagaatagatggataatttagccacatgacaataaaaaatttctacatggaaaaacttaagccatcacaaataggaaaaactatttgcatcacttatgttcaaagggccaattttgtttttctttttgtatgtaaagagtgtatacaaagcaattagaaaaagagcatcaacccaacaggaaatctacaaaggaagggaacaaactattcatagaaaattatgcaatttgttcctttcctttatataaaaatgagaaattttcttaagtatatgagaaaatgcytaaattctcattaataagaaaaatgtagtttaaaagcatattgagatactacattttacctattaaattgacagagatccgccattaaaatattttttgaaatgcctgtgaaaaagcaagcactttcaaaaattgctgatggaattacaaattaatacaacatgtgtggggcacagtttgggaatattcagcaaatttactaatacacattccctttgacccagcaattttacttctgggaatttagcttactgatacacttccacacaaactgaggaatttataaacctatttattgcagcatagttggtaacagcaaaagatggtaagcaatacaaatgtccacgcatatcgggaactggttaaataaattatagtgcatccataaaatggaatactatgcagacattaaaaacaataaagaaacttcatgtggaagtggaatgaagtctaatgaatatgttaagagaaaaaagcaaagtatagaagtatatatatatatatatatatatatatataatgctactattcttgtaagaaaaagggaggaaaagggtagtaaatgtgcataaagtatctctggaaatacacataagaactgattgcattgtctctagagttaacaactagatggctagagtacaggagtataagagatttttcaaagaacacctttttatagctgttgaatttttaaccatggggatttacctatacaatacataaacgtctaatgaaaaagagaaaacacctgtaggccaaataaaaagaaagaagcataacgttatatcagatgcttttatagatcctataaccataataaacatcacattttttttctttgctgtctagctatctctttgtaaataggattattcactaaatttcctaatgctgaattcctggagtgattcctatgtgacattttttttttttccctgagacagagtctcactctgtcgcccaagctggattgtagtggtgcgatctcagctcactgtaacctctacctcctgggttcaagtgattctcctgcctcagcctcccgagtagctgggattacaggcacgcgccgccacacctggctaatttttgtattattagtagagatgggatttcaccatgtgggccaggctggcctcaaactcctgacctcctgtccttggctctccaaagtgctgggattacaggtgtgagccaccatgcctggccactatgtgacattcttttaatgccttgctagtttatatttgtttatatttaaattttttgcattaatattcaaaactgaagatttgtttatagtgggtattttgtttgtcagccatctttggcatgttttgataaggaatattatgaaactgtatgagaattggaaatatttccttttcttttttttcttccctctcaccccttgagacaggcaagctgagtttgaatactcttggtatttttgcatatgcagtaattgtagttttacccacaggaagaagaaggaaatacttgcaaaacacaaaaaacttcctggctccaagattgtgttttatccttatctccaaccaatgatcttatggtgatagctcgagagcaaaaagctgtatttctagtgcgtgagtatcctattattttcagcgacctttattttgatacattggatagaagagaaaatggattaggtgaaaagaatataatgctttttatttatttatttctctctctctccccccccccccaactcctcctccgccccctccctccctccctctccatttccctctttctcccccttccattctgtttgttttctcccttttttctttcttggctgtagctaccttagtgctctccatatggtacctcaggggcagtactgtgcattgctcaattcttgcaagggacagtcagagctaaaaaggtcattgaccttttcttagtaacaatgtgaatgaggtgattttcaactctaatttgaaaactcataatattatggatttctgtttggggcatagcattttaactcataattttttgttgaagattaaaattgaggtttttttcatatcttatagatctccaaaccttactgatcaaagtaagattgtgtgtaaaatgtgtctagaatggtcttacaaagcaaagttaccctcaagtagcaaagatctagtagaaaaattttctccgtcatctgatgataaaagtagtcttaaactaggcagggtgggcataggagttaataactttattctacaagaactatgacaacattatacaggttgaattgggggaaggagaggctgaaggccaggagactaggtgtattataagaatcttataaacatgtttatcttatatttacctataaaaaagacccaagtcagttaatacacaactgttaaattttgtaatcatattctaaggggaaagagcaaaatttataaattactcttttagtgtattatagctaaaattattttatatgatatcttaattcttacagcaaaatggaaatatagtgataaaggaaaggaagaaatgcaatttgctgttggctggagtggttccttaaatgtcgaagaagggtaggtgccagttaatttttgtttctctgtgtgttacatgtatgtatgaaattatttgacttgtaggtgaatctattaaaaagtttcattatttgattgggtgcagtggttcacatctgtaatcctagcactttgggaagccaaggcaggaagatcatttgagcccaggagttcgagaccaccctgggcaacatagtaagactctgtctttacaaaaaatttaaaaattagctggatgtgatgcgcacacctgtagtcccagctactcgggaggctgaggcaggaggattgcttgaacccaggagtttgaggctgcagtgagctatgatcatgccctgcattccagccagtgcaacagagtgacaccctgtctcttaaaaaaaaaaattttttagaataagaaagaaatttcattatttgaaatgtttagtaaatgtatatgtatcctaactttataggttgtagagaatgattcaatcagcaaattttatatatcgtgtaattatgtttttaaaaaattctgttggaagatttaaggaagaattcaaaaagaatctcgtaaaatcctttttacattttgtcttttccctctgttctccattactaattttattcattgaaaaagtcaagggcaatcattgtcttctctgctttgctgatattgggcttatacttgaagggtacagtactacattaattcttaaaactcataaacacttaagaaatgcaagttggtacattagtttcctgctgacccagtaaagcttttgtaaccatgatatccartatggtgacatgatggagctgctagcttagaacttgagcccaaaactggttttcaattaaatctttatgactcaaaactgtctgatcagaatgagtaagaaaatccttcatactttgaattcagataaaagacaaccaagtggaagtgcctagaacatgcctggaacattgtagatatttgaaatattctctatcatcaaaataaatggtaatatttctccttacgccatttagtctaagtgttttaaagacatttgatctctgtcagaaatgcaaagcaaacataatactttaaaaacagtgaacaaacacgaagatgaattttgttcattgattacctagtatgatgtatggcatggaagtgtttatagttttttggataagctggtgatgatcctcaggtttgacagatttaacaaaagtcagtgggtaggagttgttttgattttgagacttagtttctgagctcctgacaaatatttcaagtctacatgtcagaaaaaaaatatatcttttttatataacatcacacctaacatgtgcttagaaatagatgatcagagcagtttctgcaaaatagaaaagaaaacccagcaagttgaaatacataagttcctaaaataatgtaccctgcagaaatacagtttgcatgtaacgtgactggcagttcctcaaccatttgcccagctcctgatctcaaacaagaggcaggctgaagttcttagctgaagcagaggagagagagagagatagtaggaaatggctgcgtggggatcatttgagctttgctcagttgtgtatacagtcagttgtgtaagtaaagttttgctttctgtactttcatgtttttcatgacaatacagagtgaaaaattctgttttttattaacctcaaatgcatgtggcattacattttgtgtgaatgaattttatggaccttaccagtggtggagttttactgtatttttacttatgcatcaaataaaactggttcacagaagtcatcttccagttattatcctttaacatccaattatagagaaataaaagtaattggtaagttcagtgggtaagcatatgattttgtttttgtttttagggaatgtgtaaccagtgctctatgtatcccactagcaagccaaaagaggtaaggataaataagagtcatctgttttctttgctttgatttatgagttgttaagataataaattttgtttgtaacaggagttccactgggcgtcctgactggacctgcattgtggtgggttttacttcaggttatgtacgcttctacactgaggtgagttgagttttcaacagctggaaaacactagttgactgcaatatctggttatgcatcacctttatactgtttgtgactttattacctgctgcctgaaaatgtgtagttgattctttatgggggtagaggccgggataggccgtggcaagttctggtagaagatacagagaagaggagctgtattctgaaaagagtgtacctggtatctctggaaaactgttggggaaatggtactctttgcctggccatacctgctaaggtatattggtaagaaaacaagcagggcccttctctgtgcttcctcctagaatggtgtgctcttgcttgcacagcttttgaatgaggacccagtacttcaacttaaatgcagaacctatgaaataccacgacatcccggcgtgactgagcaggtagtgtaaaaaattgtgttccaacagtaacagtggcattattttgaagcagtttctctcctcttttttaggtagaaacttaaaagagatctttgtcttgtggcacagttagttagctctgctatcatagtctagaaatataatctatttgtagctgagtaaagaataccagtcttgcttttacttatttaatgaaatattatatgtttcattctacaacaaagtaaaaccctttagttagaagccaagaaaatttcttatttttagaatttaataatggsaaggcaaaaatatgatattttataaccttatatcttgttttatttggatttaggtgccaaaattacccagagtaaaagaaaaaaaatttggccttgttactrgtgatactaccttgtacttaactgtttctcagaaaaggggttactaagcttttgttcatagtggaaaatacatatattcattgaagatttcaactgagaaaataatgctgtttagtatccaaggctctaacttcttaggtgccttgtaacattttggttgtcttagtcaaaaaataattgtagggccatttaaaccaatatgcttttatttgttttgcggagtgcatagtcaaaactatgtaatatgccttccctttgttgtactacttggcctccaaaagatttcaagtgaacagatgtatatactgtatgcatttgttaatttaatttgcatgggagatggactggagctgtgaaagaatcttaactatctcgtaggagagactaggattaaaatctaataatatctatggatgaattaatcagtaatataaagcaatacctaatttattggtaatttatttggacagaatacagtctgtacaagcttagagaaagaggagttcaatttggaccaggaaaataagaaaatttcattgatgaggcgagatttgcattaaaccttgaataatgggtatagaatttaattaggtaatagaaaagaggggaaagtgtttcaggtaatcaggagaagatttgagagaagattcgaatgtagaactatatatgcaacaacaaagaaacttatgttataaagtaatgagaaactgtcaaataagcagagtggccaaattttgcataaattcaaaagccaagtgaaaaatgagagttgattcaggaaatgagagaaactcctaaagatttatgagaaggaagtgaaataatcaaaggaatattgaagatttctttcttcaggataaactggaattagggaggctagttatctggttttttaagtcatctgtaacagatgtggagtgctgggtgggagccaggactaatatggtgtatgggaagagagaaaggactagtacaaaaattgttttggggccgggcacggtggctgacacctgtaatcccagcactttgggagcccgaggtgggcggattgcctgagctcaggagtttgagaccagcctgggtaacacggtgaaaccctgtctctactaaaatacaaaaaattagccgggcatggcggcatgcgcctgtagtcccagcaacttggaaggctgaggcaggagaattgcttgaacccaggaggcggaggttgcagtgagctaagatcttgccactacactccagcctgggcgacagagcgagactccgtctcaaaaaaaaaaaaaattgttttgaagaagaaattaataggacctggttattgtgtagagatgtacaatttttttaaaatgagctaaagatgtctctaagatacttatcctgaggaatgccattgtcaaagttggaataggggactacattggcagtaaatgttattaaatgaggttttgcacatgttgagtttgaggcgatggtaggaaataaaatcaagttactgatatcatgtaatgatacaaaactgttgtataggcacagagactagattggacacgatggttgaagtcatagataatgaatgaattctttcaagtaaagagtgtaggaaaataaaactgcaggctgaagacttaagtcttagtaactaataatactcatcgtaaggagataggagaaattgaactattaaaggaaacaaggaacagctggaaatcaaagaagataatctgtgaactgaaaataactttccagagatgtttttcatttttctaaaaattgactggatgacgaagctttttaaaatacgttaaatttggtcatgtctgtaatactcttttttagaactggtggaaaaatataactaacatttaaatatttccttgctatttgctgtacaaagcaagaaaatcatctcaaaatttttatcaagaaggaagtctttgttgttactctgyatgctacgttaaacagctctggatctgacacgtcaatttatatatcaaaaatatcttctatttgcttctttttaatatactcccagatttgtcagagatcacagaagcacatttcctctaattcagctctaggagcaatgagtgtagtacgggtgacagcaggtcattcgtttcaggagaggattcgaaagagaggaaaaatctcctggaatttcaaagaaatttcttttgtataatagcttctgtaaaaagatcttctctgtcatctagcacagtgtctacagatttggggccaatggtgtttgtattagtgttttcttcaggaagactacctggttttggagaaactaacttgctagtgattaggtcttttctgttttctagctccccaaagtcagtgaggaggctctctccctgctgctgtgatcactgggccatgcatgcttagtcttgtgaacttgtcatgtgagaacacatgccatgtcccttccccactggtttatgcccctgtggccctgaagtcttctttaaaaagagaaacagcctgacagtccagtagaaaaaggagcaaagcagatktcaagagaagaaattggcccaaaagcatataagaaaattttgagccttaataacaatctaagaactataagaaaatataatgagataacttttcaccttttggattggcaaagataaagattaacaaacttttgatgacaatatagagaaacagtcactctcatgtattgttggtggaaatataagttgataggtactctttgaggcaacttaatatatatgagaatgaaaattgtgaatactgtatgacccaacagacccacttgaaggaatttacactaaagtaatatcttactaacatgaaaagatatagacagaagaatgtttattgcagtgatgtttataatgatgaaaatatgttaattcataaatattctttactgcctattatttgcccagttcatttctaatccctgaggattcattggtgtaacaggcatacaaggttcctgctttcatggggcttacagtttggggatggtagagggaaaccaacagtaagcagctagagatatcaaggtgattccaatctctgataggtgctgttaaggaagtcatgttgataagatagtaatgtgccaagagaatatgtatgttgtttgagatggaggttcaggagcagcctctctgggtaactaacatttgaactgaaacctgaatgacaggaacaattaggcaggtgaagatctgagaggagaagatccaagcacatgcaaaggtctgagggtaatgatgacctctcatatttgccagatgttgcagccatggttaatgagttcaggttttattctaaatgcagaagagagtcattgaagagttttaatcaggagattggtttgatctgctatgtctcaccaagagcacactggctgtgtggagcatggattgtagagagcaagagtggaagcaggaggccaaactgaatgtccgtcaatatgaactggttaagtaaaatcgggtacatataatgaaagactgtgcagccacaacaaaaaatgatttgttcacttattgaaatggaaaaatatcattgacatactattgagtagtaaaaaacatgttaggatactatatgtgctatagccttatgcaaatgtgtatgaatatatttggggatgtgtattgagacgtgtctgggatttcaggtgagttttcttctgtttttacatactgtttgtatctgtgcaatgagtatatttactttttatgaaattgtaattctttatttactctcagcatctttgagataattattcaccatacacaaaaggttatatttgaaaagaattttaggtctttggcaaaaaggcactctcaaattaattttttatctatttttactgttcttctgcctgatattgctttgggtgttgggtggttatgttacattattcgtgaaattcagtataataaaaagtagataagcttatttatctattcaagaactttttttttttatttcttaaatagaatgaagagttgagtatcttatatccagctgccattgtgactattgatggatttagcctttttcaatctcttcgtgcttgtcgaaatcaggtagcaaaaggtaatattttggcaagaaatatttaacctctgttaatgtttgttttatttaatttcacctgcttatggaattaagtatgtcttctaaataaaaaaggccttctgaactagatttatgggaaaaacctgccttctgtagagaaaggggagcatgttgagtagattgcttagtaaggtagagatgagctaaaacataaacactcttcacacgttgcctttggagagtgtggtcagcacaggaacaccgggctttcttcacgaattcagcagtatgtcttggctagctagatttgcaaccaacattgacaaccaaccctagtattgacaaccaacaatggggtaaagaatttagttgcatgtggctgaggtaccagattttcactagatcagcagctgatcaaggccagcatcctaaaatctgatgactctacattgcttccatcctccctgagaataaagctatgactgtgtgcaagggagatgcaagatcctacagatatcactgtaggcaggacccagcagggagtcaacatgagctgctttttgctaactcagaacactcagaatggagaaaaggtagaggcctaaacttaatatatatatgggcaatgacattttgtgacttagggatgaaaactgcccaaataatcaagaattcttacttttactacctatagtttacattctgatgttgttacatcttttggaagagatatttcatcaaattcaacatgccattgattgtaagatacactattgttttatgtaccactaagaagaaaaactgttgccagtgaaagacacaccatcaattttcagatctcaatttcagagttgtgaaaatatggaagagtcttaaaatcagtgaaaatacaatagcaaagacttggaaccaacccaaatgtccaacaacaatagacaacaatgatagactggattaagaaaatatggcacatatacaccatggaatactatgcagccataaaaaatgatgagttcatgtcctttgtagggacatgaatgaaactggaaaccattctcagcaaactatcgcaaggacaaaaaaccaaacactgcatgttctcactcataggtgggaattgaacaatgagaacacatggacacaggaaggggaacatcacactccggggactgttgtggggtggggggaggggggagggatagcattaggagatatacctaatgctaaatgattaggttaatgggtgcagcgcaccaatatggcacatgtatacatatgtaacaatcctgcacattgtgcacatgtaccctaaaacttaaaatataataaaaaaaaatcagtgaaaatattagtagcactaacttccccttttcttttgggattgagtagaggagccttaatggccccaaaacaaagtttaactttggtgaaaaattaaatggctgataataccgaatataaaataattgtctatttctagtttattaaattaatggacttcttacctacggaaaattgccttttgatatatagattaatgatgagtattttaaatgttctcaagataatgaagcttatggttggctaaatttaaataatttaaaagattctgaaaataggtataaaaatttaaacaaattctgacctagtaaaaaagcatttactagaaaagaaccacatagccaagacatcagaatttttgccaatcataccaacctgctaaaaaagacagagaaaaatttttgattgcaatatgagatgctggatttagactaggtttagaaacaattttatgaagcagtaaacatatcctaattagcctatgttttcaggaagccgtctcaaccatttaggagttaaactttgttttggggccactaagtctcctctactcaatcccagaagaaaaggggaagtcagcgccactactcatattttcactgattataagacttttcttttccatattttaacaactgtaaaattgggatctgaaattatttctaaatctagtctaaatgcagcatcttatattgcaataaaaatttttttctgtctttgttagcaggttgatatgattggtaaaataaggaagtcttggctatgtggttctttttttacaattagtttaaatttttatacctattttcataatcttttaaattatttaaatttaacccaccataagcttcactatcttgagaacatttaaaatactcaccattaatatatatgccaaaaggcaatttcctgtgggtaagaagtttattaataaactagaaatagacaataattttataattggtatcatcagcaatttaatttttcaccatttttgaatttctgtttgtttgttgtatataagaccataaagccatttgtctcctgggaagtaaggaattaagccacttagtgcccttgggttgtaagttgctataaaaagagttctggttacttagccataaattgtgatgtttatttcagcatataagaaaattatcttttcttggccgtactgtcaatctgcaatatttagaggttatattttttctttattattatttttcactttcctgaataaacagccagaactcagcaatattctaatatgtagcatgggagtttactgatttcatgggatgtacatgaatctatggcaagagatgtaactgttgcttttccttttcttactcactaggtgaagggactgaggttaaagattggcatttcattcatttttttgacagtgctgttgctttttacatatctttctatcaagtctggcctcagttacctaggttagagaccttgctgtgtgtgtgctctgccaagtatatcaggtttttagtttttctatcagtaaagcactgattcctatccctaggattttatctactttgtcaagagggagaaattgcttacttggcatcacatgcagtttgaattcactttgtttttgttttgttttcttttgttgttttcgagacggagtctccctctcttacccgggctggagtgcagtggcgtgatctcagcttactgcaacctccacctcccaggttcaagtgattttcctgcctcagcctcccgagtagctggtactgcaggcatgtaccaccacgcctggctcatttttgtatttttactagaaatggggtttcaccatgttggccaggctgatctcaaactcctgacctcaagcgacctgcctgcctcggcctcccaaagtgctgggattacaggcatgagccaccatgcccggcctgaattccctttgatttttagtagtagtctaggatttttaatagtcttctttaattactggagtgttccagaatcttttgtgacagccaacttagtcttttaaatgtttgcattttacgtgcattgtcttggtgtgaataaatctcaccttatgccttgttttcattactttgtgtcattattagctgaaattttagaataacaaattagtatggttttaatgtttttttgtaaaacttcattttatccataataagtttggattgtcttattttatctttggtagctgcagcatcaggcaatgagaacatacaaccaccaccattagcttataagaaatggggtctacaagatattgacactattattgatcatgctagtgttggtaagtattactaattcaaattctcttggaatttacttcttacactttttattgaagtatctcatttattagaaatgggcatttattctttatttattattattattttttaagatggagctttgctctgtcacccaggcaggagtgcagtggcatgatctcagctcactgcaacctccaccttccaggatcaagtgatcctcccacctcagcctcccaagtagctgagattacaagcatgcgccaccccgcctggctgatttttgtatttttaatagagacgggatttcatcatgttggctgggttggtcttgaactcctgacctcacccgcctcagcctcccaaagtgctgagattacaggcgtgagccactgcacccggccaaaatttattcttatgtgaaaaaatgcattgcctttagtgagacatctggaagttagttcagattcagatcatcataggcatatatctttaaaactgggcatgatggctaacacctgtaatcccagcactttgggaggccgaggtgggtggatcacatgaggccagaagttcaagattagcccgacccacatagtgaaaccccgtctctactaaaaatacaaaaattagccaggtgtggtggtgcacacctgtattcccagctacttaggaggctgaggcaggagaattgcctgaacccgggaggtggaggttgcagtgagccaagatcacgccactgcactccagcctgggtgacagagcgagactctgtctcaagaaagcaaaacaaaaacaaaaagaaatggtagcagttttaataaagatttaattatgccctcagccacagtattgtacagttttaagtcactcactgtttgactaatttttctacagacaaatttggtctatataatgaccatataaatcagtcttaaaaatgtaaccttggtcaagtgtggtggcttgcacctgtaatctcagctactcagaaggctgaggtaggaggatctcttgagcccaagagttcaagaccaacctgggcaatatagcgagaccccatcgcttaaaaaaaaaagtaacctttaaactagtaaaatatagataaaagcagatttcttcttgcagccactataagagagcttactgtgttaggtactgagggtatagagatgtaaagacatgcttctctgttgtctgaaagtgtgagtctaggagcctggttagaagaaacacatgagaatggctacaatactacaacatagtaattgtaacagacaaggggaccagctgtagtgggagcagaggaggacacacttattgtttctccagcacaccatacacttttatccctagatctatgtgcatgtgggctagaatgcctcctctgtgtttgttcacttggtcaagttctactcattctatgcaaactggacactgggagagaaagagcaaggagaagaggaaggagagtgactctaaagaggctaaggatatctgacacacaggccatctttctatttactgcatagctcttacatggaatactctgtaataaaaacctattggtaaacatttcagtgtgtctacktttttgctagcataaaaatgctgcaaaattccaaagtgttaagttcagttcagggtagcttccctgctctgttaattaaactttggaacattgaaactggctagggaaaatgattggatagaaactattattctattcatttatccccagcctacaaaatgaaaaaaggtacaataaacgttattgtatgtacatctttatgtagaggtctggttaatttattcaacaaataaatgagtacctattaatatttgtgctagaaatacaagataggaccccaccctgataaagcttacgttttggtgatggggagacaaacaataaactaaatgaatatcaaactcttagtgggcatcatgaagaaaataagtaggttatggtagagagtaaaggaagagggtgctttaggtagactagtgaggaaaggcctctccaaggacatgacattcagactgagacttgaaggatgagaaggagccagctatggaaagaggtgtaggaagagcattctaggtagaggagcatcagggatataggcctgggagccttgaagacctcagagtgttcwagaaacagaaagggggttggtgtgacttgactgtaaagagtgaggggaaaacaggacaaggttaggttggagatgcagactggggttagatcacgtagggataaggagatccgattttattctaaatgcagtggatgtcactgatggattctaagtaggggattacatttaaacatatctccctgtttgctgggtagagagatgcttgtagaagaaagcaaggagaccagttattgcaataattcacccaagagagaatgatggctttatggtggaggcagtggagttggaaggaagtagacagatttgagataccttttgtacttgctcagggatggttttgagaaacaagaggaaggaaagaattaagggtttcttaatttttaagtttgagcaacgggctggatgatgagactgtttactgaaatgagaataaggaggaggagaggaagagatttaaggtagtcaaataaagagttacgtttttacaggttaacttctgacacagttaaacattcaagtagaggtatcaagtatacgaattggacatgagagtcagaagttcagggaggaagctgggaatgtacatataaatttgagagggagtggtttactgtggaatgtttcgtagagttcaagaaaagaagaaggtccattggatttgacaacatggagttatttacttactgacttttgatatgaaagttacagtagaatggtgaggatgaaagccaaattaatatagtcttaagaataaatattttcaccccctgctgtctaaaatcacaaacaaggagcataagaaatagattcccagtatctccatttttatggagtcctgacctcttgctgaagcctcatactcatttctccagctccctactgaataatttctacctagatgtcaaacttaacatatccaaaatcgagtaatttcctcctgtcaaacttgctcctcctttttttttctacatcatctttcttcttctggttgctccttaccgtgacatacaaggcccaactttatctggcttatggtacctctgacactgtctcctgtagggttcccctccctgttcattgtgtttcatcatgtagatctcctttgtgttcctcagacacagcaagcatattcctactctagagcatttagaattactgctccctctgcctggaaaactttagctagtcacatggctttctccctctcttcactcaggtctccttatatatcacattgtcaaagaggccttcattagtcactctactaggcctagaaaattatccaatgagtttgactttatggaaacttatattgagagggactttgatgtctttcaaagtgtgggaaggcctcagacgctcagggaaaattctaaatgacaaggtaataataactccagaaaaaaaagaatgcacagccaaggaaatgtaattacagtaagtagcatgtctcagcagtgagtaatgcttatatcattcctaataataaaaacagtgaatttaataaaacgttgagatacaaatattttggaaggatatagggcgagaaagagagatgtaaataagccataccaccttaagttaatgaaaaatagtgctaaaatcagtgactcgaaagataaaagccccctaaattcagtaccaatgtgtagcaatataaagggcagaaaaacactttaaataatactataggaatgtggtcagctgtagactgtgggaaattagtctcaaacagccttgttgcttcaacaaatagatttcaaaggatcgaggatgggaaggaagggttgaggaggtcagaaggattttggaccaagctttatgtccatttgtttgtggttcttactttgaaacccagaggtattgtttttcttagcaatgatcagctattttgcttcaagagcagagaatgcagaaagtttaggtcaaccaagattaagatttagccagaggagtatgtgtgtagrgggaaacgagtgtagggaggttgtggatatttgcaagaaagtgatgatgatggaacacaaagctaagctggatggaaagggaagtgatcccaagaggtacttgataaatagtggaaaaaatagtaggattaattagtttaaactcgaaattgtgaaattactgcagggagtttctggagtaattgagatggaaagctaggaggtggtggtctaagtgtggtaagcttgaaatcaaaaatacaaagaatctacagttgctgatgacaggatctaaagtgtgacattgaaaatagatgatttaagttataggaaggaaaacatcattggtagcaaggatggaaaggattgatcagccatttccttacaataaattagaatcctttaaaaaaattgcatatctattgcaaaattgtcctctggattactgtgtagtaatttatactcccatgtatattgcatgggagtttaaaaagaagctgttttaaaacttaaatttcaatttatgtgccatacagtttgccctttgatcgtgttttggtggagtcaggcaaaacttaagcaaattttgtaatgtagtgaaaacattttgtatactgaatcatggattcattcatgactatgagataggtgttctgatcttttataatggtctaggaggtgggaggggagtttaaaaaatagtccaaggatttgtttgatcactttaattcctataaagccagtgaatggcttgcgtatgaactcactcaaagaatttcctttcctaggacacgtcttaaggacgaatgcattttttgacagttttcaggcaaaggggaggcctgaaatatatgtatatgaaatttagtaaggtcaggcacagcagcacacgcctatattggctgggcacagtggctcacaccggtaatcccaacactttgggaggctgaggctggaggatcacctgaggtcaggagtttgagaccagcctggccaacatggcaaaacttcgtctctactaaaaatacaaaaattagctgggcatggtggtgcgcgtctgtaatcccagccattcggggaggctgaggcaagagaatcgcttgaacctgggaggcagaggttgcagtgagctgagattgcaccattgcactccagcctgggcgacagggtgagacgccatctcaaaaactaaaaaaaaaagaagtgaattggtatttggggatataagtggactgtatacttctggtacctctgagtttcatatctgttcaaaaaattaaattttgtttttatgatattctatagattatggaaattatagatggaaattttaatatttattattattatttttttgagatggggtctcgccctgttgcccaggctggagtgcagttggtgtgacctcagcttactgcaacctccacctcccaggttcaagcaattctcctgccccagcctcccaagtagctaagattacaggcacccaccaccatgcatggctaatttttgtatatttagtagaggcggggtttcaccatgttggccaggctgatttcaaactcttgacctcaagtgatccaactgccttggcctccggagtgctgggattataggagtgagccaccatgcctggcagaatattttctgatgttgactttgtagcttttaaaatgacttttggttattaaataaaactaaacatttagcatcttagaatggaactgaagtaaaaatgtaatgaccgcaataacattgtacattcaaatcacttttttttttttattaggtattatgactctgtccccctttgatcaaatgaagactgcctccaatataggtggatttaatgcagcaattaaaaatagtccacctgccatgtctcagtatatcactgtagggtccaatccatttactggcttcttctatgctttagaggtatgagttttatcaatgatcatgagtaaggctgctcttgattttacaatttgtctacaaattggatatggtaacttgcttasccttagaagattaagcagtttacatttctaaatttcaattgaaactaaaattaatctcaactagctttcttctaaattctttagattaactgaaaaggtactaccatcagtataaaaggaaattctttgtttctgaagccctgagttctttgatagctgagatgtctttaaatattggtgcaatagtcaggagctcaggcttgttaatgatgccagcccactagggatttgagtaaatgaggagttgtaaagacagaacaagctgccaactatacttgttataagtggtgaaaattgcttcctaaaatagtggaaagttgagtgttagatttggcagctcttgtttctcacttaaaaagcatgcttctcagaattgtccaaaatatctttttacttttataaaaatgtgtgtgtgtatatgtgtgtgcatatatatatatttaaagagagaaaggagccagttatgtgtaggtgtgaaatccatagtccagctagaataatgtaatcttaatgtcctagtttaaaatttatttgaatgaaattacaatttaaagagagaaattctaatggtaaaatagactaattgtgattttatttttaaactatagagttaaaactttttctcatattacgcctaaaataaactttttactgtactctgaaagaagctgagttgctagtccagcctttacaacttttcaaagcattttaaagtaagctttatttagaaagtatgtttgtttctttgtaagctactaagttttctctttcaaatkttctgtttttcagggaagcacacaaccattattatcccatgttgcactagcagttgcaagtaaactcacttctgctttatttaatgctgccaggtaattacttaacaattaaaataacaaatatctcatttgtatctagcttgcttttaacttatattttgatagtttgcactttaaaaccctggaagctcagttttatattctamgttttctttcttttcagtggttggcttggttggaaaagtaagcacgaagaagaagctgtccaaaagcaaaagccgaaggttgagccagctaccccattagctgtaaggcaagtctgtcatgcttcccaaattttagtccttttagaaaggtactgttaaatgtatggtctttccgtgtgcttggttgatttgctgatcttgtctttggaacttctgaaagccattacagtggaatttcttttcccactagaatgtaaaactccatgtgaagagtgattcttacctgttttgttcacagctttatccctgttatatactaggtattcaagatgtatttcttgagtgtgctttttaacaaataaacttagcttagttgtaggagaattaattcagtgatagctgttaaatttcttttaaaagtttagatagtttgttactaagttgtataaactttaaaagtacttagtgatttctttttaaaaaagtcatcctagtggattgcggtggctcacgcctgtaatcctagcactttgggaggcctaggtaggcggatcacttgaggtcaggagtttgacaccagcctgctcaacatggtgaaaccttgtctctactaaaaatacaaaaattagtcaggcatgatggcatgtgcctgtaatcccagctactccggtggctgaggcaggagaattgctcaaacccgggaggcagaggttgcagtgagccgatattgcactgttgcactccagagtgggggacaagagcgaaaaactccatctcaaaaaaaaaaagtaaaagcaggagtcctgtattcaggcactctttaaacagactcctgtcctgtgcttccttgtttacttcagtagtgctttagaatgtgttagtatattggtgagttttttttggtggagggagcatgatttttgttgcttttttttttcattattattttttagataggagcatgttttctaatgtttggttttgttttaaaatcattttttattacctaatataaagtaccaccatgaagggaaatagaacacctcctctttatggatgttcttcacctaagaagagccaactaattattaaaatttatcgaagtatagcttctaagttttttttcatctttttaaaaaatacattgtaacatatcacatttcctaatatcaagagtcaataaattagtcacatggccctgtgcgtctctaatagatgtaacaaaggttgggcacctttgtttcagggacttttctctaaatgagctttcctagttctcttttagtacttctttacttttattttactcacaattctaatgaggttgattatagaacaacagaagtttagagataactatttagaaaaaggaaggtttttgcttcaggcagattggtgtcagcaggatgtcatatcttgcaaaaaagagaaagattaagaagaagaatttaaaatagacaaaagatgcctgtgtgggagcatattctaaaatttagttgatggtgaggacattgttttctgtgacatgccttttaatcaaatatagttatactttatattctctaaaggtatagggttgtgggtatctattgaaaacctacataggactgtggttttatttcttttatgtattttatattacaaatgtcagttgtgattaataaattaactattaatccaggtaaaattcatatttctttatataaaaacagattcagcctatttcatttatgcatttcgttattctgttatatgtttctgaactggaatgtgatttgagcattttattttcttttaaatatcagatttggacttccagattctagacgccatggtgaaagcatatgtctgtctccatgtaacacactggcagcagtaacagatgatttcggcagagttattttattggatgtagctagaggaattgcaatacgcatgtggaaaggtacttcttacaaaaatccagaaaaacaattaattcactttttaccccaatagttgagcaatgttatcatccttcagcttctggatgataactctgtttaattcttcatgtttacattttctttttttgacatgaactcagatcagcaaccacttggtccagtagtcagttgatacatcttttaggtttgatcacctcatagccatgtttaacctttgccttttgcactttctttcaattctcactgttattgtcaatttctgagttcagtttcttgcccctgctacatttattccccttcacaaagccattcttgagccaaatgttctccccaaatctataatgccaagtctttcagatttaagatagcaaaacccatcttcactgacttgacttttatatccatatgcttgggtcaatccacctggtgtgtcaataagtatgtcacttaggagtttccttcagctattattaacagacctgagtaacagaccacagtatcttcaggaacccagtcttcttccttgtagcttccccactcaaggttctcatagacagccctcttatctgcattccgggaaggaagcagaaaggaagaaggcttctcctggcaactgagtcaatctactttgaagatattccccgaagtcccttcaaccattatctacattagccaggacttagtgacatggcctcatctaactataagggagacttgaaaatatcttttaactaggcacattgtgaataatatctccctgactaagaaagaagggatgattacattatttagaatcatctggaatagtaacatgtcagcatagaccacaatttatggtgcaatcttgtctatcctgtaaaatgtgaggaataatgaatggattgaggtcattcaattactctggaccagattgaagccactatcaccttcttgccaaagaactcctgcagtgatagacagaggcagtctttacctactacatgtctcagtatctgtagaaatagttttaatactgcagatacatcatttctccttggtgtttgtcttctgaaacaatatcaaaggtatgttctcagcaagacttttctaaaatacgaagacgaagctgtactgactgctccaaatccactatggcaatcttattccttgcatcattgcctgtctgcagctagtacagccagtttttctttccattgtgtccttggaaagaaggatcaattgcctatgtgagggaccaccctaaaatggaaaatagcatcagctacgtctcccatgcaagagcttcctcccatcgtcctgtaacccatattttctatctgcatgtcaccaaaaggcttgtgtgggaagggaagggaatgagagcaggaggggtaatcaggtggcttcaattatatctataatcttttctcttttttttttttttagagagtttcgctcttgttgcccaggctggagttcaatggtgcgatctgggctcactgcaacctccacctcctgggttcaactgattctcctgcctcagcctcccaagtagctgggattacaggcatgcgccgccatgcctagctaattttttgtatttagtagagacagggtcttaccacgttggtcaggctggtctcgaactcctgacctcaggtgatccacccgcctcagcttcccaaagtgctggaattacaggcatgacccactgtgcccagccaatattttctttttaaagagaaaaagtggtcagaagtaaatatagcaaaatagtaagatttgataaggctgggtgatagactggttattatttattatcattttttatttaagatattccataataaaaaatatacttttatagcttttcttaccccacccccacccccacccccactattccagagtacttcaggaggctactatggaacctagattaagtaattaacttccctttacctctgtctctaagggtaccgcgacgcacaaattggatggattcaaactgtagaggacctccatgaaagagtgccagaaaaggcagatttttccccctttggaaattctcagggtccaagtcgagtagctcaattccttgtgatctatgcgccaagaaggggaattttagaagtgtggagcacacagcagggacctagagtaggagctttcaatgtggggaagcactgcaggtaagctgcaaatgctggcattgtgctggttacaaaatgaaatataggaatgcttttattaaaataaagctttactaaagctgcttattagattacaagtttgagaattacaatattctttattgtggtttttcctgtgagtgcctggcatgtacttaagtatttaataacaaaaaaaaaaaattaaaaatgccatgatagactgctgaattaaagttagcttgttgctaatgtttgtcccttacttatgctgggaaggctcaaaaggaaaggttccttttgccctagtcataagtgaggtgaatgctttgtttgccattgaaacaggggcctgattgtgttcatttaattttttagaatctttcaacaaggcagaactctgctggttgagccctgctttacttatgtacttgctatcagtatttagttgccttattaatgctcctaaattgatartaatgttgggtttcctagctataataaaagcaccttttggcatttctccttgttctaatatttttaccatattggtatgtgatttctttaggctgctgtatcctggctataaaataatgggtttaaataatgttaccagtcagagttggcagccacagacttatcagatctgtctggttgatccagtgtctggaagtgtgaaaacagtgaacgttcccttccatttagcactgaggtaaggtgtgtccagtgttgctgattgacgctcctctgctaacttttcctagttcctaggtttgttgtactctcttttgtagttgctattttgttgtttcctttgtctttagactgatatctttaaagttaaataggaaatatataaaggaaaaaaaagttggagtgtgtcagaattagaaagaaaataatttcacattctgtaataatttgttatatttattggtttagtgataagaagagtgaacgagccaaggatatgcacctagtgaagaaactagcagccttactgaaaacaaaatctcccaatcttggtaggtattctctcatacaaataataaagcatattgttctatcatcttttaaatcaataaaatattctgaatggagcaatcaaaataatgcatggatgagcttattggaattgctctgtaaggctgaagtgtgccatctagagggtgttataattcataacaagaaaacattaatgtgagagaacccaraaatcctttagactcactgatagtacagatatgttcattttctttcagaataatgtttcactgttataaaaattaaaattttactttgattatttttttctttatagatttggttgaaacagaaataaaggaattaattcttgatattaaataccctgcaaccaaaaaacaagtaagtgtatataatacacgaactttcctgctagtagctataatacatccttcttaagaaaatctttattttcctatttcccccaaacatgagaggctgaagtcttcttttcacatttttattgtttatccctttctttattttcagatagaagttcctgttgtctctttaaaaaaaaaaaaaaaaattaatattcatgcctgtaactgtaatcctagcactttgggaggccgaggcagggggatcatgaggtcagtagttcgagaccagcctggccaacatggtgaaaccccgtctctactaaaaatacaaaaaaattagttgggtcagtattggcgggcgcctgtaatcccagctactcaggagctgaggcaggagaatcatttgaacctgggaggcggaggttgcagtgagctgagattgcaccattgtactccagcctgggttgccatacatctgagtgtgttttatatacacatacctacacatccctacattatatatattatatatataaaatagtaaatatgtgtgtatgaccacctaccttaggaaataaaatcttaccaggaactctaaagagccctgagtgtcccccctcagtcccattcccttctcccatccctaaggtaactgtaatttagaattttgtggttctttctttttctttactttatagttacgtcattcctgtgtggctcctttgaaacctgttgatgcatttcctgccttttcaaactttatataaatgcagtcatgccctatgtcttctgtgactttagtttttccttcaggattatgtttctgtgtcattcatattggtgtatgtagttatagttataattgattcatttactatgccatacaaattctgctcactgactagaatttatttacactcctgtcagtgaacggttaggttgtttccagatttttgacattacaaatgatgctatgcttatccatgtacatatttcctcattcacatatgcaagagtctctctggcgtttatacctaagagtggaattgctagggtgtgagcttcttcaactgtactagttgatggcaaattgtttcccaaaatagttgtactaatttatattcccacctgttctgtatgagtccctgttactccacagcctcaatattccatggtattgccagacctttactttttgccaggctcgtggttataatatggtcaccactggtgatttcttttactcccactcctcctatccaaacccctcataatgctattcaagtcctaactccacaaattcttacataatgcttcgatccccatggataactctgaactcctactctactttcaatcaaaactggatagttaatgactacttattttctaattatttcatgtatgttaatcatagcttccccgacttttttttctttaggtcttttaagctccttcaagtaggaaccttaccaaatacttgatttttataattcacagcatctaaaataatgctactgtgaaaatgtaagaaaaaactgtatcacaggttttttcttttctcttacacagtcactcgacacttctgccactagatgtagggttttttttttttttcccacacaccagtcaatttctttggcagattctccagctaacaccagctggttattctctaattcagttcgattctgacaccatctacctggagatagcatgagatcatcacgacaggttaagagctcagtcccacaagacttctacctacttcaggtaccagtcacaagtagttggttgtcagctatatttctgactgtctagctataaattagggttactatgaccccctctttgcggttgatgaatttgctagaccagctcacagaactcagggaaacgttttacttgaacgtttacccatttattataaaggatattacagagggtagagatcaacagccaagtggaagaggtgcatagagtaaatcatatgggaagggttgcagagcttccattccctctcctggcaagccactattcaggaacctctacacgttcagctatccagaagctcttccaacccttgtccttttgggtgttgatggaagcttcattatataagcatgattgattacatcattggccattggtgatcaactcagtcttccagctcctcttggctccccagaggtcaggggttgggctaaaagtttcaatcctcaaatacatggttggttccactggtaaccacccccttattctgaagctctccaggagcctgccatgagtggcctcattagaaaaaaagaagcttctatcacccaggaaattacagaggtcttagaagctccccatcagaaatggggggtcaaagaccaaatgttagaacaaaaggttctcctagcacctctgtctacaaagggattaagagctctgactgatgaactaggacagagaccaaacactagaacaaaagaaactcctagcacccccattgttcaagaaattataggaactctgtgtcaggtactggggccatagaccaatatgtatatttcttattattttatagctacatacatgggagaattcagtgaatagtgatacatgggagaatttagtgaatagtgatttctgttgcagtccgtttttaaaacactttattgagttattgtagaacagaaaagcctttgtgacttttaattgtgtcttccattctactgacaatgctaattggctctcattttgctcagggtaaagtctctgttattagagatgacatgatgatgacaaagtgggcatctagagaggcatattgagaaatctgtagtagaaagggtcataacccacacggttcttctcatttttatgccatctttcttcttatcctaaatcatagaacaacaaaattgggaaaccagcataatgcaaaatgtcttcttgattttcttttttttaatggtacttctgaatcatgtatgaagctgtgaattttataaagaatgctagaaaacccagtaacaaaagttataggtcttctaggactgactaaagggaaggaagaaaccagttcaggctttgggagactgttgaataatggggaagaaaacaagctagctgctagcctgggtaatcataggcagaactggagcaggttatgcttgtcctgggttctggcctcttacagtcactttctttattgtttcctggtagttacttcattataggcctgaccaacatcttgagccaccctctaagcccatttctcctccacaaacacgcagaggttattgtgttatgatcggatatttgtcttatcccacattctcagcctactttttgaactatttaatctcattaattaaaacccaacttaatgtgctaatatgaaaggataaatatgacctttaacttctgatagttgctactttaggcatgaagagatattttgggactggttatgaagaatcttaaatatctatgggggtggggagagggaggtagggaagggtgggtactgtattcatctagcagggcctatagattctgcctgccatgcacaaatgcaataattaaggtataactaagtttttggcagcttttgttattgacatgacaataacctctgcttttcgtttatgcctatatagtataggcatattcaaactcttcttattggtaaatagctttatctttgtttctgttttgatttggctattctgttaagtagcagttgccttctagttgttttattctcagcctggatttttgtcatttatgtcatatttggcatgacatgaagttgattgtatattacttaacaacgcaacttgagatttaatatatgtacactaaaacatcttaaatatagagcttccctttgaaatttggggtagtgaaagtttgggcataaatataagatttaaaaaacaaaatcactgccttataattactagaactgttcaatatctttctcctaggctttggaaagcattttggcaagtgaacgtttaccattttcttgccttagaaacatcactcagactttaatggacactttaaaaagtcaaggtaatagggtttgtactgattggaggttatgttcttaactcawattttgtaactctgattatagaaagctattgactttgtgataccatcatgttactttaatgtggaagtaatatagatataagaaattaagaatcttatttattccctatttaatatatgtagttgatcttcatctaagctgtctttgaatgtattgactgttattgggaagttgtttttaattgtgaggaaagatgtcaggatagaatgataagtggttattctgatatagctttgtattaatgttctatcagtgtatcagtttccctcgtgaacagagttaaggacttccagaatcacaatcaacaatcagattattatttctgaattttctggtcattttttgatattcaaaatttgtctgtactatcacattgttctttaaaatccatcagtccgtcaaaatgtatttgtctgaaaaaggattacacttgaaacttgaaactgtggggttgtaacaccatattccatccaactgaactagtaaaaattcactttattctgaattcctaacatcagttaaattgtgtgcagtggactgatgtcatctagttgtgacttttgtttgtcatattaattatgtaaaaccagctttgtgttttagttgtgtgtaagacagcttaaagtggcttaatacacaaattataatttgttctttcaggacttcaaacatgctaattttgagactctttttcaaccttttttttttaacagatacataaaactgacattggcaaatagtgaactcctttagcatacaccacttgtcagaaataaatccctcttttaaaaagcgtggtatacttacaaagccctcccacccctcaaggcattcacaacatcccaaaatttattaaatgaaaagttatcttccactggcctggtagtaaaccaaacaccattgttggaattccataaaatcatcagtttcaagttctacataaacataagattcctaaaaactttaatcattttgtgtggtcagttttattatggctataagaacttgaacaatattccatgatactgtatttcaaataagattttgaggggattatcagtgtctccctttttaaagaataaatatttcttttatattagatataaatattcatacagtatatgaattatgtagtcagggaaaatattttcaaaggtatttccagataatttctttaaattttaagtattagatgaagatatttccgcttccttttttatctccctacttttagagcatcttattttatttaaaaagttagacattttgtcatgacagaaaaattatttttgctttcaaaacctggtatagcttaagcatctcagtatttaatacatcagagcatcagggaattacataatattgagagatttaatgaaagcaaagcctgtttatgagtctgttaaatatatctcttatatatacttttccttctgccttttagaacttgagtctgttgatgaaggattgctacagttttgtgccaataaactaaaactgctgcaactctatgagtctgtcagtcaattaaattcccttgattttcatttagacacaccattctctgataatgtgagtaatcccacattttatattatataaaataatctctttgattagttttactttttaaaattagtagtaaagargtagaaaattaagaattttttttaaagctttaaaggtatattttccttaccaagccccctgctagctctctgtgctttgctgctatatttatattatttatacaagtgctgagattataggcataagccactatgcccagccatgatatgtttttgtacatatagtatataaaaatagtttgaaagcctagcaggttgtatccctgagagccacatacaggacttatatgtagatacaatgagaatatttttctatgtttttattttatagtgtttacgctgctttataattaagcatttaagttcaatatttagtttcctcagaatagtaagagttgcgtttgacacccttttaaatttttttctgattatacagtaatacatgtttattaaaattctagcatttgccaaggcatagtggcttgcacctgtaaccttaacactttgggaagctgaggtgcgaggatcacttgagcccaggagttcgagagcagcctgggcaacatagtgggaccctgcctctacaaaaaaaaaaatttttaattagctggatgtggtggtgcacacttgtggtcccggctactcaggtggctgaggcaggaggattgcttgagcccaagaagtcaaggctgcagtgaaccatgattgtgccaaggcactctagcctgggtaacaaagtgagaccctgtctcaaaaaaaaaaaaaaaatgctaacattctagaagataataaagtaccctcaagaaatatcctaaaatggtacttttaataccatttcttttagtacctacctctagtaccatgtttggtttggtaccaaacatgcagtgtttcaaaattatagtttactttatttaaataacttcctactcatgaaacgtgatttgtaagtaaagttttaagcagaatacatgataggtattatattaattaaaaagtcgacttttgcttacagccttgaatttcagttcagataatgtgggtgatagatgtggaatgttgttttgttttgttttctgttttaaaggacttggctctgttactaaggcttgatgaaaaagaactgcttaagctccaggcattactagagaaatataagcaagagaacaccaggacraatgttcgattttctgatgataaagatggtgtgttgcctgtaaaaacattcttggaatatttagaatatgaaaaggatgtgctcaacataaagaaaataagtgaagaggaatatgtggctttaggtaggtaaaataatacactggtctttgtatgcctcttcttttagaagaaaacatggtaggaacatatagcatctcagagattccatttgttttgaaatttaaataatgaaaggatttaatgtactgtattttttggccaacaaaagatactctggtcaacaggttgtattaatgagtatactaaagagacaatattggatcatgatttgctttctgctttaataaatcaagcaaattgaacaattaatttctcttccttcataatgttttgtttctctggaattccagattgtgattcaataagattgttagtccaaatggtaagtagtcattgattaatgtgctttgtttttcttctaccaggtagtttctttttttggaagtgtttgcatggagaaagctccactgaggatatgtgtcacactttggagtcggctggtcttagccctcagctgttgttggtaaggtttttttggttgctggatgctgttcttccttgtgaatgtcacccagaagtgtcagtcttctttttttttttaactattgtcttttaggatatcacagaatgtccatgaaaactttctaaaaatgatcaaagaaaattttaatcaccatatttaatagaagtaatattatttatttttcttataccctgtaattttttttttcttttactttgagagagagagagagtcttgctctgtcacccaggctggagtatagtggtgtgatcatcgctcactgtggccccaacctcctgggctcaagccatcctcccatctcagcctcctgagtagctgagactactgggcaatttttttttttacttttgtggagatgggggtctcgctatgttgcccagcttgtctcaaactcctggcctgaagcaatcctccccgcatgaccgctcaaagcttttggattacagacaagaaccaccatgcctggccaattttctgtaaatgttaacaagcatatcgtatagttggcctaaaataagtttagaatctgtgtgcacccatctatatgcgtgcatttacagtggaattggatcatcagtaaaaaactgtcatgttacaatgaaaaatatcttaaaaacaaaataagcttcccataaagcaatgtggaattgttaccaaacattttcagactttgaatatatattataatgtaatctctaatataacaaatataaaacaaaagaatcatccaaggaggaaatacaacactaaatttttaccctttctgaaaaaaacaaggaaagttaccccatcttccttgttcttctttgttattacctatcccctacacatgcatgcatacacagttgtccctcagcacccatggaagattggttccaggaacctccccctccattaccaaaaccatggatacagaaggtcctgataaaaaatggtgtaataaaaaattagccaggcatggtggcatgtccctgtattcccagctactcaagaggctgaggcatgaggatcccttgaatcagggagatcaaggatgtgctgattgcacctctgcactccagcctaggtgatagagtgagaccctgtctctaaaaagcaaaaaagttaaaatggtgtggtatttgcatgtaacctatgcacatctcctgtataccttaaatcatatctaggttacttataatactttctgcaatgtaaatgtgtaaattgttaaaactgtaccgttgagggaataatgacaagaaaaaagcctgtacatgttcagtatagatggaaccgtccatctttttttttctgaatatttttgactcacagttgattaaatccacagatgtggaatgcatggatacagagggccaactgcatactctttcacacacccccatttacatgttatattttggccaggatttgggcatcctacctctgtgagcttgttgatggtttaatgtgttgtttttattatgtatgtgtctggttttggtatctgggtaatgttggcctcatagaatgagtttggaagtattccctcctctccaatgttgtgaaatagtttgagtataattgatattagttcttctttgaatgtttgaaagaattcagcaggaaattcatcagatctgggcttttctgtgatgggagactttttatgactgcttccatctcgttacccattactggtttgttgaggttttctgtttctctactgctgttggcataaagctgttcataatagtctctaatgatcctttgtatttctatggtatcaattgtaatgttttcttttttgtctctgattttatttatttgagtcttttctctttgcttcttagtctaactaaaggtttgttgattttgtttatcttttttaataaaaacaactttttttgttgatcttgtgtaatttttttattctcaatttcatttatttctgcttgatctttattrcttcttttactaatttttaggttggttcttgcttttctagtttcttgaggtgcattgttagattgtttatttggagtctttttattgaggtgtttattactatagacttccctcttttctttttttttgagacgtagtctcactctgtcaccaggctggagtgcagtggtgcgatctcggctcactgcaacttccgcctcctgggttcaagcgattctcctgcctcagcctcctgagtagctgggactacaggcatgcgccaccacacccagctaatttttgtatttttagtagagacggggtttcacaatgttggccaggatggtctcgatctcttgacctcgtgatctgcctgtctcggcctcccaaagtgctgggattacaggcgtgagccaccgcacccggccgacttccctcttagcactccttttgctgcatcccattgttctagtatgttgtatttccatttttattttttcaagaaatttttaaattttatttttagttgcttccttgcctcattggttgttcagtagcatgtcgtttaatatctgtatttgtgcagtttccaaagttcctcttgttactgatctctacttttattctgttgtcagataaatacttcacatgattttgactttttaaaatttgttgagaattgttttgtggctaacatatggtctgtcctggagaatgttttatgtgctgatgaaaagaatgtgtattctgcagcagcaagtgaaatgttctataaatgtctattaggtccatatggtctagtatgtagtttaactctgatctttctttattgatgttctacctggaagatctgtccattcctgaaagtgaggttgaagacctctgttattactgtattgaagtctgtctctccctttagatctattaatatttgctttatatatttgagtgctccattgttgggtgcatatatacttactattgttagatcctcttgctgaattgactcttttttcattgtataattaccatctttgtcttctttttttttttttttttttttttgagacagtctcactgtcgcccaggcgggagtgcagtgtcatgatctcggctcactgcaacctctacctcccaggttcaagttattctcctgcctcagcctcccctttgtctctttttataattttcaacttaaagtctattctgtctgatataggtacagcttctcctgctcttttttggttttcatttttatggaatatctttttccattccctcactttcagtctatgttagcctttataggtgaagtgagtttcttgtatgcagtatacacttttatgttgttgagtcactctatgtcttttttttattattattattcctgggcctaagctattatctcctctcagccttccagtcagccaggactataggtgcatatcactgtgcccagctcactctgtgtcttttaattggagaatttagcccacttacattcagtgttattattgattggtaaggtcctactactgccattttgttacttgtttattagttgctgtgtaactcctctcttttttctgtctttttttttatagttaagtgattttctcttgtagtatgtttcaattcgctacttttgatttttgtgtatctattgtaggctttgcactgtgattaccatgaggcttacaaaaaaaatctagttacaacaagtatttaaaactgataccagcttaactttgatcacaaaacagcaaaaccaacaaaccataaaaagaaaacctatacgcattaactctcttctccccccattttagcatttttgatgtcatcattttatgttattgtctcttaacaaattgtcagttttttgatagttttttcttttagtcttcttactaaagatatatgtggtttaagcaccgtgattagaatattagtatgacaatcacattagcatcattttctttcagtttggagaactccctttagtgtctaagaaatcacacatttcttataggataggtctgatagcagtaaattccctcagctttcgtttgtctcgggaaatcttttatttccctttttcatttctaaggaataactttgccacgtacagtatttttaggtggcagtttttttcctttaacactctgaacatactgccccactccctcttggcctgtaaggtttctgctgagaaatctgctaccaagcatattggatctatcttatatgttatttgcttctattctcctgctgttttctaaattctctctttgtctttgacccttatgagtttgtaaattggagtattcttgtctgagttaactcggattggtgacccttgaccttcctgtacctgtatattctggtttggaaagttttctgttattacttatttgagtaaacgttctactcctttgtctttctcagttctctctttaactccagtaaccscaatatttgctcttttgatgttgttttatagatcctatagaccttgttcattccttttcattcatttcatttctttcttctcctctgactatgtatttttaaatagtctatcaacgaattcactgattctttcttctgtttgatcaattctgctattgatgctctatattgcatttttaattttatttatttttcagctccgaggtttctatttgatttttttcattagtatttcaaccttttaaaaatttctctgataaatttttgaatagattgtgtgggttttcttaaagtttgttgagcttccattttgaattctttgtctgagagatcacacatctccctcactttagattctgtctctggtgcctttctttgtccatttggtgaggtcgtgtttccctgaatgttctcgatgcttgtggtagtacratggtattgtgcattgatatattaggtatgtactttagtcttcacagtctggctttgtttgtacttgaccttcctcagagggccttccagggattctaagctgactgactttcatgttccctgagcttgtgaccactgcaacacttgacatcactctaagcccaggcttgctgcaggtctctcaagagctctgaagtttatgtggctttctatccttcatggactgggggaagacccaaggagggtactgaggctatttgggaatactggccagggacctgggtccagaagtctgtcctggtggccccgacaggtatgcatcccagcaggtgtctgcacaggtggatgggtccccagctgcagttagagggggtagaagtgagactggacctctttaggatctgtgtgaaaaggaggctggggggcctgttttgttggctcagatggttatgtgtcgcccagcaggttcctgcacaagtgaggtaattcctcaactgcaacaggaggggcttgagctgagactgggccctcttgggatcagctgtgggaatggaggctggtgtgtctcatgttggctcagagaggcatgtgtcttcagcaagttcctgcacagataggatagttctccagctgcagtgagggggccctgagggggatctgctgtgagatagaggttggtgagcctgtcagggaggctctgagtcctgggctgagagatatgggtgagtctgcctctgggtccttatgcaagcaactctgagctgggacctcagctaaggaaggtgagagcagcaccacaaggctactttccagcccactgctgagaccagtgctagcgggcagactagcctttctgccaaaacactagtgtgtacagttctttctggaccccatggcaaatggttttggtggcaggatcatgggcaaacagggaagtagccaagccccttgtggggactgggctgtttctgggcttcaatctggaagtcagttcagggggacagatcaaccaccttattgtgagagaatataagtaggttgccttctattccgccatcttggtgacctcaaggtttctgttactcaaaatctattatttagacatcatctggttatatgtcaatatataacatatttatatgtgagataacagttaatattttaatatgtgaattcataatataaatatattatgaataatgtaatgtggcattctttgttgtgactgttagaatatcttattttgtatttactagttatggaggtagttacctttatacactagactcttctcctgttatatgtgtccatatatgtgtttctatgtggtaacttaatttatctctgtattcacttctttatttttcttctttcatcttaatgtttcctgcaatttaaaatatctatattgcttataagtgattctacaattatatgattatgttctgatagtttctttggcatcctctattttatactgatctcctatatacaaacaaaagcttgactgtttggaagttttaatgtttatagaaaacaggaaaaacacactctaggttataaacagagactacctgtagggtgggaaatagaaggaggtaacctagggagaaataagaagcaaagttaagcagagcaggttttttgtttgtttcagaattttattacaagtgatggtgggtagaggagaggttggttggagagaaaagtggaattcatagtgtgaagagaggtccaaggcatggcatttaatttttttggctgccttaatataaaataaacttctggctgccaattttgatgagcattttgaaactttgttgttgatggggaaatgaaccaagctttaagagacattaaatctataggtatgtttagaaatctggtattccggccgggcgcagtggctcacgcctgtartcccagcactttgggaggccaaggcggkcgaatcacgaggtcaggagttcgagaccagcctggccaacatagtgaaacccgtctctacctaaaaatacaaaaattagccgggcatggtggctcgcgcctgtagtccaagctacttgagaggctgaggcactttgaacctgggaggcggaggctgtcgtgagccaagatcgcgccactgcactccaacctaaataacagagtgagactctgtctcaaaaaaaaaagaaaagaaaagaaaagaaatctgatgcactttaataacaggcccaggtcagacattttgtatgtaaaatttatcaaagtgaatctagtggcaatttaacagtgagcctaaaatataagataaattctgctctcccccaacatttctttttgatttgcttcccagtatacatgcacataaaacagcgagacagagttatttttgattgagtatagaatgtctttgttaactgtataggcaaccaattttttcagcctacctagtggtgaaaagcatcaggttatggaggttaaggggaagtctagaagagaggaaattcccctgataaataaactaaggtcattctgaattttgttggttaaacaggatattgggttgcaagtggaaggaacatggtgtaattatgatcccattgttgtgacagtgactcccccttatcctccctcaaaagtacgatatatgtatctatacatataaagctgttaatggcttggagcatagtaacctttatgtagccattagcatttattgttgttaacattgtcattatttatgagcatggaagatatatttgttttttaaaaaaggtttctaatgggtacaaaaaatagaataagaccttctatttgatagcacaacagggtgactatagtcaataataactgtgcatcttaaaatagcttaaagaatgtaattggattgtttgcaactcaatgggtaaatgcttgatgggatggacactccattcttcatgatgtgcttatttcatgttgcatgcctgtatcaaaacatatcaagtaccacatacaaatatacacctacctactatgtacccacaaaaagttttttaaagggtgtctatatgggatgaggtaaaaagggagctggtatgaggaggcccttggaagggaaattagaccaaaaaaggaaaaaaaatagaaggcattaaagagtgtgcgtgtatgtgtgtgtgtgtatatatgtgtggtttcgtaagtgtaaaaattaagtgcatatataaatttatatgtacatgtatatatcctcatacacatgtgaacatttttaaagggggagaagagaaaatacgcatgttattaatagaatcaggcaggtttattttcaaattttagttcttttttttaaatttatttgagatctgataaacatggatccaattttagttcttttcttttctttttttttttttttttttgagacagagtctcgctctgtagcccaggccagagttcagtggcatgatctcagctcactgcaacctccgcctcctgggttcaagtgattctcctgcctcagcctcccaagtagctgggactataggcacctgccaccccgcccagctaattttttgtatttttagtagagatggggtttcaccacgttagccaggatggtctcaatctcctgacctcgtgatccgcccgcctcggcctcccaaagtgctgggattacaggtgtgtcaattttagttctaactcattaactgtagtgctggacatgttagctttcccgtatgagcttatttcatcatttctgaaatctggatcatcatccctgccacagaagttattaggataaaaggaggtgatgtgcatgtcacgtacttatcacagctcctggccctaagtcgtcctcataaattcacttctttcatgtgcttcttctccttcaactctttaccctccttaatttttgaaaactatttgaaataattcatttaaactaacagtcagtcttttaacttagagctatttttcacataaaagtattgcagtattataattaatcaaggcctttcagagataccagtacttacagatgtaacaccatttcattaaacttcattatcccagaattatctgtgaaccaattttataaatcttaaaaaaatttcagcttcaagtaggtatgctggtttacagccattttaaaagtcacttatgttgacttaagttttttggtttaaagtctgttttttcataacttattagtgatttaaaaattggagtttgatacttttatgtacttgctcctcactgccacgtctgcaatacctttgtacagccaaggcaaggctaagatccacagctacagatcctacctctctctccagtcaaaacctacagccaagtggcacctcgttcatcaacagcagatctatgctcacgtagtagtaactcctgtctggtaatatgctccttaatagagatttggattggaaggcaatgcttaacccaaagaaggtttggaaacagtgaagtttaaatatacaacaggttatagagaatctcctaggtagacaaggtacctcatattccctctcagattacatgatacagcaagcaaccactaattttttcacctcaagaagctgcatcatccatatgcatgcatctgctgtctaggaaagtgtaagattttgkctatgctaaatttttttttagactgaaaaagatttaaatttgatttcagtctctgctcctgagtgtttggctttcaaaggaaaaggatattttggataaaccacagtcaatctgctgtcttcataccatgctgtccctcctgagcaagatgaaaggtaaacaaagtttgttgctctcgtcaacaaagtttcgtgtttgaaatgtcacaaaaagatgggagagtggataggatcccttaacaaaaggagtctgtagtgtacaaaacatttcaccgtagagattcttttatgtattaatagaatactcttaatgcatttgacttatgctttaatttatgaaattttatattttgtatcatcataaaaaaataacatgatttgaacaatacatcttaactcagtaaggcaaatggaatggtcttcggggaaggcaatgttttycttgttattttttgtatgattatcagaatattaatctgttaaaatattcaacagttttcagtaatgatgaaatattccaaataaggatttatattgattcagaacaaagatgactaaaagakcataaataaatggaatataaatgttctgaataaaatagattgttagacttccacttcattgagaaatacaaaaacacatcagtaggtaacttagttttaacattatgtttaacataaatggttagtccaaaaaattgacagggtaagagtttatttttctgttttctcctatccctatagtggccatcgatgagacctgggattctcagtctgtgtccccatggtggcagcagatgcgcacagcctgtattcagtctgagaacaatggagccgctctgttgtctgcgcatgttgggcattctgttgctgcacagatatcaaacaacatgacagagaaaaaagtaagtgggtaaaggtatggctttgatctgtacacatccagtaggctaaggggatgctttccttttctggggtttttcggggggttttttggagcggggagagggatgagaggtgctccccttaatttctttattgagaatgatgccgtggatacttgaatttagcagttgtcacatggcagtgtcctactgtgtttttttctcatctcttgaggactcacatttcctttacagctcatggtggatcaaataattttttccagggrgtgttaacgttaatttggatgagacacctaaataggtctgtggagattcacttaacattgtcagccactgttgtttataggctaaatttaatattgcctgcttgaaatgttcattatgatggagagagatgaaatttcagattgttttttaggttgaagagtgcattctgaagaaatataagtattttgatggtactgatagacaaaacttggcccttgccaaagatggcccagaaaactctgaaatgtatactggttgagtcagggccattagtgcaggactccttataaatatctgaactcaccatccttgcccatgagtctccaatctactcctgaccctcatgtttcatccagccaagtagtaatatttgtgaaatagcatgtatgtgttgctttgtgatgtatcctcagtatccatcagctttcaagttaaaagctcattcaagttaatattgattcagaatctttggcaaagaatcaccagtgcattttttattagttttcccaarcagttttgggtgctgattcagaggccctcactgattcctgggaggcactttctcttgacactgagtactggaaactccttctgaaacagctggaggattgtctcatacttcagactctgcttcacagcaaagggaacactcagacctccaaagtgtcatcactgcaggctgagccacttccaaggctttctgttaaaaagttattagaaggaggaaaaggtaagctgaagtttatttgagcatttgcatccatttttttatgttacgagggtttcttttaatagaaatgacggaaagaatagagaaagaaaaatacactcagatttaaaaataacaataaccttctayatactacctttaaattaattttctctaaagtctcatttggtcagttccacgctcaggaactgctaggtgcttccctctgcctaagaaaattggcagtgattctcaaagagtggtcagaggacctcaggagtcctccttttttcacctacatgtctatatgagaccagattttcctcttatacttcaaccaaaacacagagcacaatagattgaatggcaaaactgattggagaatccagatataaaccaggcattacagagatttgcaaatatgtaaagtagtgccatrtttctcaccaaatatcctttttttttttgcattgggaaatataactacttttttattattatactttaagttatgggatacatatgcagaacgtgcaggtttgttacataggtatacacgtgccatggtggtttgctgcacccatcaacccatcatcgacattaggtatttctcctaatgctatcccttccctagccccgcaatcccccacaggccctggtatgtgatgttcccctccctgtgtccatgtgttctcattttcaactcccacttatgagtgagaacatgcggtgtttggttttctgttcctgtgttagtttgctgagaatgacggtttccagcttcatctatgtctctgcaaaggacatgaactcatcttttttatggctgcatagtattcctttgtgtatctgtgccacattttctttatccagtctatcattgatgggcatttgggttggttccaagtctttgctattatgaatagtgctgcagtaaacatatgtgtgcatgtgtctttatagaagaatgatttataatccttcgggtatatacccagtaatgggattgctgggtcaaatgtaattattttcataaaatattagcatgtaatcagtttattttcatttcaaaatggactaataaaatattttttaatttatcagttttaatttttagtaccataaagattgacagccataactcataaaccaaagttctgtggggttgccagtaattttaaggggatcatgagactagtaagttcaagaattgcctgaacaaagcataaactcttaagcttgctctccaataacttttgactttgaatccaactgatttttctatttctttctcatttgcttcctagattttagttaaaatgaagcatccgtgtgcttcccgtcttagatctggacctatcctcttccctttccctgcctctctcactcatggatatcgaaatcttacttatctttcaaggtccagctcaaatgcttctcctccaggaaacctttcatgattcactaactgcaaattttctcttcttcctcctaatatccacagaacgttattcctctgttgtgaagcatcactttctactgtcctggaatcatttgggttcctgtgcttatatcttgcaggaacataaacatcttacatttttagttgtctttgggggctcacactttttatcagcagctcttttaggcatttgatactggaaggactgtatatgaggtttataaatacccacatgtttatagatttttagtttacttcttttctcattctttataaaacttgtgaactttttcttattgtaaactcaccacacttcatgttgccacctagtgaaagggtaaggatgccatttgaatattaacctaagcaatggaatcaggggcttaattctggaatgagaattttccaatgatttagaagccaaacataagaaattagatcacccagcacactgctcacatttattttcactgataattgtgaatttactgtgaagcattctttttgtggaaaggtttttatttgaatcaaaagatgaggaaagactgagaaagttttggtaaacaatagagtataatttgttttcgataataaacaggactcgttaaatatctggaacgtttttcagcgtgtttacaattttttgtactatattgatgactgagacatgatataatgctgttgattagctatagctaaattaggcccataaatatttcatataggcaaatttgttgattattaaaagtaatagggctgggcatggtggcacatgcctgtaatcccagcattttgggacgctgaggcaggtggatcacctgatgtcaagagtttgcgaccagcctgactaacatggtgaaaccctgtctctactaaatacaaaaatttagccgggcatggtggcacatgcatgtaatccaagctacttgggagcctgagacaggataatcccttgtacctgggaggcagagggtgcagtgagccaagattgcaccattgcaccccagcctggacaacaagagcgaaactctgtctcaaaaaaaaaaaaaaaggaatatttactgggcacagtggctcacacctgtaatcctagcactttggggggctgaggcaggcagatcacctgaggtcaggagttcgagaccagcctcgccaacatggcgaaaccccatctctactaaaaatataaaaaaattacctgggtgtggtgggcgcctgtaatctcagttgctcgggaggctgaggcaggaaaatcacttgaacctgggaggcggaggttgcagtgagctgagatcgcaccactacactccagcctaagcaacaaagcatgactctgtctcaaaaacaaacaaacaaaaaagtaatattatattggccttaggagcctagacaaatgtcatactaaccaatctattttcatttataatttaagtaaaagtgttttaagtatatattaattttttttgtctctggtaaagtgtattttgaacttagaaagcatatggtttatagacatatgcatgtgcatttatatttatctaatattttctgagagtataaggatgccctgacatcgtaaatatcccacttgttgccctcacaagttgcgtggtaggtaggaacactgctgtaaatctcatggctttttcgggtcagcttcaggctgagaaatgaatgtggcacttagatctcttcgtaaggaaattggctcccattggcaaacactgccctgtgtgttgtaaatttttattttctttcttgtctccaaactataggtggcattgcagacagtgtagccaagtggatatttaaacaggacttcagccctgaagtattaaaactggctaatgaagaaagagatgcagaaaacccagatgaacccaaagaaggtgttaacagaagtttccttgaggtatcagagatggagatggacttaggagccataccaggtgatacacaaataatgagaaatatgaaatccaaattggaaagatgtggccaagtgttcattaaggaaaaaaataacatcactgctttcttctgactttcagacttactgcatttagcctatgagcagtttccttgtagccttgagctcgatgtcttgcatgcacattgctgctgggagtacgttgttcagtggaataaagatccagaggtaagattctcgttacctctttcatgttatttctgcttctgtgttcatgctattcatatatggggaccgtctaattaaatagcttattataaacactggctttttccccgttgtaatgcctctgtactaactagggtagacctttttcacatatttcctcttacaatcctcccagtaaacctgtgaagtatagatactgtcagtatccccactctaaagaaaatactagggctcagagaagttaagtttcttccctgcagacacacagctaagtaagtgtcaggatttaagcatatggttctctttatctaaaaccagtgtgctttgctctactccctagttaggttgtgacaagtatattgtttatttccttctgaattcctgcatgaaatggccccaaccgaacacaatattcttaatattatagtcatcgtgataaaagtcaagagtgaaggtcctgagatcaacctagtgtctgattgttcaaatatgtatttgtctgttacttctgtatgcctcagaagaacaaagaggcagatcgtgaccagggttgactgtagtccaaggttagccttgctgccctctcagctctctgctcaggcttcattttctattgctttcggtagccactgtttctaccaggacattcacagtctggaagcagcatatggggaagaccccaagcctggaggcagaaggcagtgatttggatcccagctgaattgctgacaagcttctggctcaagagggccactgaatctctggcctgttattttctacctccttccacctcctttttaaaatgaaggtgccatgatcaaataagatataaaaacatattgtaaatattcccctttgccaatcagtccttcacttagacctccttagtcagttccctggtaaattattcctctcaaatcaaaattcttaactttatcttccttatatgaggttgcactattgtagagaactctcacagatgaactaattcatgctaatatattaatggaaacgatactcttccttcctccaaaaaactgtgtaatcacttatatattaaaggaagacattatgaaagtaagtgatttaaataaaggaatagtctttgatcaattaaaccttgaccaaaaaatgattttaggacagaggaatcctyttaatgcccttcaaatcaccctcttcagttgactacagcctgaatggcgatcatatttaggctctctacttaaatgtgttacttttccattttattaaaaaggaatgttatgtctagaatgagaaaataataatttctaaaatctgaattaatttcaaattcaagtctaaaaaagtggcatttaagaagaaaattctgctttgtagtatttgtttataaaccaaaggcagcttgcagaggggacatagacaaagctgacgtcaagccccatggttgctgcatagagcttgtaatcctcatagcacacggtttctgaactcttcgtttcaatgttctcctaaaatgagggctgtaatagtagttatctcaaaaggttattgcatattttgagaaaatgaatgcatagtgcctaacattttgactagtgttatcagtatcattaatgttgcttacatttaaaagaagttgttgttttacttgtttgtttttcccattaaatattcatcttgccccatccaaccagtctcagctccaccatttgacacacacaattttataaggctcaaaacaataaaattaccttcagagaaatttcaacacagtgtgtattggcaatgatgatatgtttgatgatgatgtacaagctacaaaattatttagcagatatctaaattatttaatcagtgttgtatactgtatttgagttttaatatgtaaacttctttgattagaaagagttgaatttcaaacatcccatctaatatttcatatttccttcctgctttaatgtttttctctttggcacttaccattaacatactaaatataatatattaacttatcatgtttattatataggtccctcactagaatttaaactcagtgaaggcaagacttggggtctgttttgttcattatggaatccatcgtgcttcaaatagggcttggtgcatactagatactcaataaatatttgttgaatgatgaatgaatgaatagtatctacaaaagtaagcttattgtttttaaatctgtatgaaattcaagtatttattggagagaatattgctatgatgttcaaaccacagcaaatttgaatccagatgttagcccatatgaccgaggagcttctgggaattaattattgtataggtaatgtgagttgaagagggacagtttatcaaaagttatttcttatccaataatttcatgttattattgcaacattcttaggtggttttatgcagaaatttatgtaagaagtctccattgataatggtaaaacctattaaatgatacctctttttctttctcgtttttttctccctgtatgtaaggaagcacgtttttttgttaggtcaatagaacacttgaagcaaatatttaatgcacatgttcaaaatggtaagtaaacagatgttagaaacatcactgtttgatctaaaagaggcttcctgatttaacaggatgtgaatttaaagatttacaacctattaaatttttatttgattatcctgcagcctaacatattactgtgtattggctgaggtgcaagggtctcttgagcccagtagttcaaggctgcagtgagctatgatcacaccactgcatccagcctgggtgacagagtgagaccctgtctctaaaaaaaaaaaaaaaaaaacaaaacaaaaaacaaaacaaaaaaaaaacagtactggccattttaactacttggaaaagtgctatttataaaggggcaaaacaactgatagtaatcaccacttctgttccccaagcagctgactactatccctgagtgtaatgaaggcagctgttctgtatctagctttccaaggaaagagggaatcaatgatagatgcagaacagctgccttcattacacccttcacagatagtgaaggaaagagggatggatttctcaggactgcaattcttaataaaaaatcttggtagccaaaagcctaataagattagactgtagcaactatcttgtgcgtcttataatggatgtgaatattctccattagctgccttggcaactactgatgcctccttgaaaaaatattgaacttgtaaacagattccatttaatagatagatgggtttcattataggaattgaggatatcagcactaagctagttagtaaccttagtaaatgatgagacttggtgttaggctgggtaagaggagatatcaccttatgtctctgtaataaattctagagaagctatgtatttttcacctctatcacatgcttgcaggtgacatgaaatccagttgcagaaattgtaaaatatcccattttacttgaagagaacttgaaaattacttattcatctcttagatcttaccttcatcctatatatatatatatatatatatatatatakakatgtatttatatatttaccttgactgatttagaaaatatcatgtttagattattctatctttattgataaaattaagttactgccggacgcagtggctcacacctgtaatcccaacactttgggaggccgaggcgggcggatcacgaggtcaggagatcgagaccatcctggctaacatggtgaaaccctgtctctactaaaaatataaaaaattagccgggcatggtggcaggtgcctgtagtcccagctactcgggaggctgaggcaggagaatggcctgaacccaggaggcggagcttgcagtgagcagagatcactccactgcactccagcctgggagagagagactccgtctcaaaaaaaaaaaaaaaaaattaagttactaactgacttcagactagtatttcttcaagtcaggcctttacatatttgtacctttacccatcgagtagggttcctggcttctcatagcctgtgatgggccttactcatagacagactcagctacaagggtagtaataatagcatgtgaaatgccatgtttacattgcctaattgacaactgtttcagaaatttaatgttaatgccacagctcaatgagtagtgacagggtcttgctttgttaccccagttggagtatagtggcacacatagctcacaataatcttgaactcctgagctcaagctatgctatcacctcagcctccgagtgcgactatagccatgtgccaccatgcctaattttttaaacattttttcatagggatgggttctggccatgttgcccagcctggtttgtttgtttgtttgttttttatatattttgtttttaatacttttttatataactacatactttagtttgcagttatatgtgaaaaaaatcaattggcagacattgggattgtttctagtgtttggctgttgggaataaaactgttcccaacaatctcatacatatgttctgtattcatttctctagtgtatatacccagcagaattgtcgggtgatagagcagacacatgtttagcttcagtagctaccacccagcagttttccctgtggttttaccaaattattataccaccagtaatgcatgagtgttccatttgttccatatcctcactaatacttggtattataatttaaaaattgttcttagcctttttggtggttatgtaatgctgtctcactgtgacattgtatttctctcataactaatgatgtgactcttttcttcatgcttagtggcaatttagacatactcttatacagcctagttctgatttttattaaatcagattttaaatgaaattaaagatttcatgaactttataaatattacatgagatataaaaaatgaaatcaaaatagtctatatagtttaataagcttaagaaagagtaatttatgtgtaataaaagtgagactatataagcattctatttactacttttacttgctatctaggcattgcactgatgatgtggaatacgttcttagttaaaagattttctgctgctacatacttaatggataaggtaaggtagtttcatgtattgacttcttatttatttgattctcttatttgactaatattagaaagattgttcacattaggctttgttagactattttttaatttgataaytagattttactcatactcagttaaatgtaatgcccagtactggcattttaatgacataaagaaggactctaaatcctcataaagagactaatatattataaaagcctcttaactaaagagattaggactggtagttgattcaagcaaggatttgcattttattttaaattaaagtgtacaaatttacacttaccaatctttgatgtaaggccaagatattttctttgaatggagttgattgcattctcctttggttttcttgtgtaaacctcacccataatgtattgcctatcatggctagatcttatttttttaaagttgttgtgtaatctgagtccaaaacctttagatttctataatttttatagttgttccctctgtatctaatccaaaagacctaggagttattctcctctataaatctttgcaaagcattcaacatagcattcatggaaataactcccccttttttctcattcatatttcatcagttatggaattaaattacataattacagtgacatctacaaccagcatgagtagctttgggaacaagcataacatataagcatagaactcaactggtgggagcagaagctgctagcatgccgacagtaccagcctagcctccagctgagtggccagggacactagttagtgtgttttacaggccactcaacaatgtagattagtgtagcatcagatgagtggatgctaagagaattaccactgtaaagataacatattcttttaaatgtatagtcacagtcattcctgcatcatgaatagcaccacagccaagacccaactttaggccactgctccccttgaaattactctctttgatgttattgataacatttttctggttaaatctaaccattctttcctctgtgctcatcttccttgactgaatagcttctttcttggaacttgcatcttttggcctttatgatgttgttctcctattcaacttcacctcttaccccctcgtctttcgagagaataacagtaaaatgtaatttatgtgtgttacaatttgtagtttcacagcattctcacatccacaatcacttttgatcttcactactttggggcaaaaacagtcctaaaccaggaagtaggaaatttgtgattggataagtctttattataatgtgttatctctcatgtgccaagactatgctaggttctgtggttgaaccaatggaagttatggtcctggccctcaaagagctcacagtttgaacaccaggtaaacagacartagggagtgtttggagctcagaagaggaggaaataaataacaaaacaaggggaaggcttctgacttaaattttggtggatgcctatatatataccagtaaaaagtaggtgagaggaaagtatatcccagcagtcctggagatatgaggcaacttgttggattcagagaactagaagtagcttaggatggctggaacataggctatrttagaagaaaagaaaagctaagatgaagacattcctgtgcaggctgtgaatttggattttctagtagtatgtgtaagcttagcacagggtctggcacatgtggtaagggctcagtaaatggtagctattattttatattgaagacactggggcagttttaagcagaggaattatatattcaaatttgtgtttaaaaagatgattctggcaacagacaaaatatcttgggactggggtcagctgatcttggttgttccaaggctgttgcagtaatcccagcaagtggtagtgaggtgacatttttctccaatgtctcctgtgagtttcctctcttatcaagtagtatttctgagggcagaacttttgcctcccacttattacactgtagacatatacagtaaaatcttaataagtacttattgcgtaaggaaatttttctgggctaggaatataactcccatgtgctttagagtggttttcctttctttctatttcaaacaattgtgcctttatcaacaagctgaattcttaggtgttcttgattagtagccctgaattaggctctgggttttttttttagtttttctttggtaggagtgggatggagtctcactctgttgcccgggctggagtgcagtggcacaatcttggctcaccgcaacctctacctcctgagttcaagkgattcccctgcctcagcctcccgagtagctaggactacaggtgcatgccaccacgcccagctaatttttgtatttttagtagagatggggtttcaccatgttggcgaggctggtctcaaactcctgacctcaagtggtcggcccaccttggcctcccgagtgctaggattacaggcatgaactaccacacccggcccaggctctgggtttttaggcaacacagttatttgactgtacagatttttagagtttttacttatttaatagttcagaaatatgtaatttatatttgaaaaggattattcttgagcccagtgtgagattaagtttcaccaccaatttaattgcatctactgttggtagagccaacagctaattaatgaggctgtcacatttayttatagcgccatttacggtttttaaattcggttactttttattatttgtgccatagtaatgtctttttatttaaattattaaatgttacaacattttatctttttattttaggttggaaaatcaccaaaagataggttatgccgaagggtaagtgaatctcccatagctagaattatggttgttaattccacacttttatgtagtactttattaactgtataggtgaactttgccttttatcattgtgatgacgtatcagaaggagataagaaaaatgaaaagagaatactgcattaaggaaactggtcatgaactatggccarttttaatttacttttccagattgttagatagcatattaaactaggtttttataagatgttgttcagctttgaactgtgaacaggttaacatgctaccattgctgcatattccgattagacatttataatggaagcatccaacatcaaattgaagcaggttcaaatgaagtagttaatttgatctacctatatatatgatatatataataacataagtatacaaatacaacattagtcttaactaatattctaatccatggatatgggacttgtatttgacccaagaaattaatagtactagcttccattgttgaagactttttctgatgtgttcttgagaatggttgtatgactagagtgtgtacgtgtgtgtgcatgcatgtgtgtgtgcatgtacccacaaacactgaattatttgctttggggatgtgaggaaattataagattgttggttttaaaaagattatatggcagggcgcggtkgctcacgcctgtaatcctagcactttggaaaggcgaggctggtggatcacctgaggtcaggagtttgagaccagcctgaccaacaaggtgaaaccccatctctactaaaaatagaaaaactagccaggcatggtggtgggcgcctgtaatcccagctactcaggaggctgaggcaggataatcgcttgaacctgggaggtggaggttgcagtgagccgagatygtgccactgtactccagcctgggcaacaagaatgaaactctgtctcaaaaaaaaaaaaagattatacacaaatgcagtggtcccttggacaagccctttaaaggagtcattgagaatcgtctgttgctcacagcatcaatctggtatttagttctcaagcttgaggattctagttttgctcagagggtygggttcagtctctaaaagacgctctgaaagcagaccaggctgttttcttggagcttttcaggttagattctcatgtgtgtatcttccatctaccacgattatttggctaccagatgccttagcaagctgaacagkgagctcagaagtgccaccatctatagtaactaatgaggctgtttctttacaatacacaaagaacactactttttaaaagtcaatatttataccactttgtaaagcttgactttaaaattggttgacagtaaatctaaaagaaggaacttaaatatgctaatgccttgactttcaaattcttgcctgtctattcagtgtggaamgtcagctgaaccagtgtattstatcctggttcttgtttggctgacagtaactatagcagttttcctgcagggcctaattacgttcctttttaaaaaacaggatgtgggaatgastgacacagcaatgacatctttcctcggctcctgtttggatcttcttcagatcttaatggaggtaaaagaggtgtatttttcattctgaactgctcctaagatattacatattctgcaaaccattgcatttaataaatgactattttaatgaggttgtttttcattcattcatttctaaattttgacttgagcccagaaggtagtgatgttttcttattaaattcttattgaaattagactttgtgtttttttattacaatttgggacagtgtgcaatatgaatttgcactttgctgctaataaactcattgggatatttgtaagctattatttttccattactgaacacagtcctccattctcaaaacccttaggcagatgttagcagggatgaaatacaggtgcctgtgctggatactgaggatgcgtggctctccgtggaaggaccaatctccatagtggaactggcccttgaacagaagcacatccactacccactggtggagcaccactccatcctgtgctccatcttrtatgcagtcatgaggttttctctgaagaccgtgaagccactttcactttttgacagtaaggtaagtacctcacaggatttcagagctattttggagttgcaggcttagcagacacatggattttcatatttaatagaagctgtccagtacttttgtgactggtataatttggtgtgaggttccaactccctcattccctgcttgattccgttctttttatttaccttctgtactgctccccttggagttttgccctctcagctgtctgctcttctcattctccatattattcctggacagactcattttctccctcttatatatctctaggcctgaccaatccctagagtttgaggcattcatttcttttgaacttctctctttgagtgtcttataggacttcagacacctcatatctaaaatatatctgcaaaccaatacccacatcctgcccctaacctaaatttgctgttccttctgaattccctgacttggttattttattaacgatgtcatcatttttgccctggcaaaaactagaaactttgaagttatctcaccaattccttacttcaagccaattttcttcattgtaaattcattcttgtaaattctgccatagatcatgcctgtccgtttctctccatgactataaccctagttcaggcataatcatctttccctcggctattacaacagccctttcttaatcacgctgcctccagtttctctctctccagtcccatgctgcaagagctgtcttcctaagagacaggtttaattgtattagttctatacctaagattttttttggctcctctgcaggatcaagtccaaatttgtgagtagaatatgtttttacatattctattgtaaccttcacagtttagctgcagtggatagtaaaatcctttccttccccacgcaggtgtcaaattttgagagacaggacaaactgttggagacaaaaacgtcaacattattacttagctttttactgatagaagctgggttagagaacacagcttaggcttgtgggaaagtgggtttattatttcacccttaaatgagagactcccggacagtcatggtggctcacacctgtaatcccagcactttgggaagacaaggtgggcagatcacttgaggtcaggagtttgagaccagcctggccaacatggtgaaaccctgtcactagtaaaaacacaaaaactagccaggcatggtggtgtgtgcctgtactcccagctacttgggaggctgaggcaggataatcgcttgaacctgggaggcagaggttgcagtgagccaagatcacaccactgcacttcagcctgggccacagagtgagactctgtctcaaaaaaaaaaaaaagtatagattttgaatgagttagtatatctttgagaatataagcgataagagtacttaaaagttaaaaaagagaaagaaataccaaaataaagtgcctagctcagtattcccatcagaaaaggcctttgtgaaaccagaacacatccagaattggattagcacaataatgtttagtttcaacccatgtcatgccaagactacctgagacagctgggtgacactcatctgcagagagctagtatggttgagtggctagtgaaaacaatcccggtgctaccatttgctaactagaattatttagattttcttactctcagttttctcattcagaaagtagcagtgccagcctcatggttgttgtaagggttccttgtattcaacatgaagtacttagcagcatctggaatgtagtaaataataagtggtgctattatagatgctatagctaggaccaccaggtgggaactatcgagtaacagattgtgagtgtatgctaaatctttaaatacttctctcagtgatgtccaaaatgtcatgggttgccctgtaagtccggtttttcttatcactaaaggatgagtagctttaatctacttggcagtcacaacagatgacctagaatcacagatgattaggtatggaaggcacattggaagatacctaggatgacctgcttgcagaagaagaaacggtaacccaagattgtgggtcatttacccaaggcaacctggatggaagtggtgagccttggactagacccaggtctttcaacttaaaggccaatgttctttgctctgtattacatttccttccaaggaacttctaaaatcctgtttcctgatattctgtttttactctttagacacacatctgttcttttaaataaggtgtttttaaacaattcaacaagtgtttttaaaaggattcagaggctgggcgcggtggctcatgcctgtaatcccagcactttgggaggctgaggcgggcagatcacctgargtcaggagtttgagacctgcctggccaatatggtgaaaaccccgtctctactaaaaatacaaaaaaattagccttggcgtggtagtacacgcctgtagtcccagctacttgggaggctgaggtgggagaatcgcttgaaccaggaaggtggaggctgcagtgagctgagatcacaccactgtactccagcctaggcaacagagtgagactctgtctcaaaaaaaaaaaaaaaaaggattcagggtacatatatgtattacttagctattactgcggagtaaatcatcccaaaacttggctgaaaataacaaatatttattatctcacagttgttgtgggtcagtaatctgtgttctccttatctaggtgcctctggcttagtctctcatgaggctgtagttaaggtgctgcatctgaaagctcaactgggatggggacagggtgattcacttctaagcacaattgttggcaagattcagttatgccacatgtgcctctccatacagcagctcacaacacggaacctggcttcctgcagaacaagtgagagtgaatatgagtgcctcaaggcagaagaagcagtcttttggaacgtggtcttggaagtaacatgtatcacctctacctgcttctgttgctagaagcaagtcatcagcctccatgcaaggagaggagactataggaaacacgaataccaggaggaggggatcactgggtttcatcttaaaggctgtctactatatactagataattgttataaaaattattctaaaatcttactgttcaaggagaaataaaaatcaaccataagttattattaagttttaaacaaatctttctccctctccccccttaataatccacactcatcagttttcttgctctctttctttttagggaaaaaatgcatttttcaaagacctaacttcaattcagttattacctagtggggaaatggatccaaattttatttctgtacgacaacaggtaaattatagctattggattttgtttttgtttcttggaaaaaaaaacataagggaaaaatctagctggcttttgaaaagaatgactactttctatcgcaaggacagaaaaccaaacagcacatgttctcactcataggtgggagttgaacaatgagaacacttggacacagggtggggaacatcacacaccagggcctgtcgtggggtggggggaagggggagggatagcattaggagatatacctaatgtaaatgatgacttaaggggtgcagcacaccaacatggcacatgtatacatatgtaacaaacctacacgttgtgcacatgtaccctagaacttaaagtataataataaaaaataataataatatttaaaaaagaccaatttcaaagtattcttgagagctagttgtttaaatgatgtgttccttttttgataactaaacaatttaatggaaaagccactataagtgacagaaaagctaacaatacttggtttaggtattttaaaatgaaacagtaacaatgcattgctctatctctttctccattttcaagttcttattgaaagttgtcagtgcagctgtccaggcccaacattcagccacaaaggtcaaagatcccacagaagaggccacacccactccttttgggaaagaccaagattggccagctctagctgtggatttagcccatcaccttcaagttagtgaagatgttgttagaaggcattatgtgggggaactatacaactrtggagttgaccacttaggagaagaggtaatcatgaccctttgaatgttaattgggctcaagttataaaattgatagttggaataaagaatcagttaagtttccaatgaagccttttgctcttccttttattagaacatctaggtataaaaatagaacaatagaatattttttaaaacataaaattataatcaaataattcctacagtgtgccaggcctgccctacgcacagggatatagcagtaaacaaaacagacaaggttccttcatcatggacttgatagtctgctggtaggagcagaaaagcatgctaaattttgcattgaatgataggtgctatgaagaaaataaagagggccgggtgtcgtggctcacacgtgtaatcccagcactttggaaggctcaggtggcasatcacttgagcccagaagctcgagaccaatctgggcaatatagcgagaccccgtctctaaaaaggaaaaaaatatttatttttaaattgaaaaagaaagaaacaggatcatatgaataaacaggagccactacagtagagtggtcagagaaggtgacatttgaaccgagcccccaaggagaagcagcagccagctactcagaaactgggggaacagtgcttgagacaagaattacaaaggccctgaggtggggactagaatgactaggtccaggactagaaaggccagtatggctgaccaaacatagtaagcaaggaataaagaagtatggcatgaggcagggaggctggcccgggccatggccctatcctaggtctcggagcccatggttattctaagtgtattcagaagccattagaggggctgggcgtggtggctcacgcctgtaatcctagcactttgggaggccaaggtgggtggatcacttgaggtcaggagttcaagaccagcctgggcaacatggtgaaaccctgtctctactgaaaatacaaaaaattagctgggcgtggtggcatgtgcctgtaatcccagctacttgggaggctgaagcaggagaatcgcttgaacccaggaggtggaggctgcagtaagctgagattgcaccactgcactccagcttgggtggcagagtgagactccatctcaaaaaacaacaaaaaaaagccattagagggtttcaaatagacatgacatgaaactccttttatttgccaaaagtttgaaaacagcacactgagtagccacattgaattgaaagattaggtgatgagagaaaaaaaaattaaccaaggaacagaaatttgggtttaaatgctaagtttgatttggatttatctttggttgtatacaatcaaaagataaatggccacagttcaaaaatcaactagaatctcttcactggcaacccctttcctatagaataaacaaatctgctcactctgactgtattatttctccatgttcctatcttcaggccattctacaggttcatgacaaagaggtccttgcctctcagctgctggtgctcacggggcaaaggctggctcatgcgcttctccacacccagacaaaagaaggaatggagctgcttgccagacttccacccacactgtgtacttggctgaaagcaatggtcagtacaatagaacgagatcaggcaaaaggtcattggatgttttcttgagtgcctgsttaataacagttatgaagaaaatttgacaagtttaattcacctagttacaaagaaaagcatttttatgtaataactcttaagtcaataacaattattgtttagttgtctataataggktatttttgtgtcccatttgcaggacccccaggaccttcaaaacactgaagtgccaattgcaacaacagctaaactagtaaataaagtaattgagcttttaccagaaaaacatgggcaatatggtctagccttacacctcattgaagctgtggaagccatatctcttccttctttatgacacttacctactggaaatagtctaaaattatgattataacatgaagtagtgcatggttattttacatagtaagacctggaattttatgggaaaagtatgtctttttttttccttttgtaaaataaataaaagtatatacaacttttaaaaagtgcaaccctggctaaattccactcctttggttaatactgaagataaaatataaacaaatgtcaactctgttataattaatacagatgttttactgtttatttctaattcaaacacttaagtagctttattgttaaactttgctatttaaaattggttataatttagattatgttcttataagattctatatttcctatctaaaatgttgttgtaattcaatttaaatgtgttcatgtacagtccccatcagyagcgtatagaacaccccactctcctttagtaaatgttgagaaaatgcctttgttgtcatgctccaaatcccacactgggctgccacctgggagttctggataccgaaaggttcctttcccagaggttctgctgttgccatcagaggaggatgaccgtgcttgaggaggaagaatgggttcaagatcatcatattcatcagaaggggacactaaatagaacccttaacctgttgtacttgccaaaattgagaatcagagatgtgtaaaatgcagcaaattaattataatgtaagttaagatttgctttttgccaagttgcaaagttgtatccacatcaggtcactgtaaaaatgtattatcttgtaaaacttatgtaaaaaaaaaaaaaaaaaaaaggcaaagatactaaaaattttaagtccgactttatttttcctacaagtgtttagaaatgcttctgggatttgctaatattatctgtccttgggaacagtattgaaaaaactgcttagtggtattacagctttagcaaacctacctcacagctgggatgagaggataaaatacaactaattttgtaccctatagtgcctagagcagtccaagtgctaaataaatatttactgattaaaaccaaactatagctactcgggaggctggaggaggatcgcttgagcccaggagtttgaggccattctgggcaatatagcaagaccctgtctcgaaaaaaaaaaaaaaaagaaaaaaccaaactaaccaaaactctgtaaaagagtgctttgagctctacaaataccaagtatttattgtggtatatttttagaatgtagccatacagtgtaattatgggtatctgtcatggatcacaattattattcatagtaagtcattgtgatacagaagtttgtttcttcacttccccttaagaagccaactatagtaatcatgcaaagttgaggagtatgtccttcagggatataaaaagaaaaacaaatctgttttttgagctaaaagagcacatccaaacaagaatttaactggctaaaatttagtaattactgttaagtaactatcaaacttgaaatcttacaagataaatggttaagatgtcttgagtatttgggatgggggcctgtgagtctgattgagacatacattttacagagtagcagcactggaaagggctagtccaacctcccagcctctgcttgggtctccgctgccccagccacacacatcctagaattcttgtaaacatatctggctctgtgttaacagtcacttgttatatgttttctaagagattagttcttcctgtgatttttccaagtacgctgaaagtagtagtatgaacttaaggaggctagtcaaagaaacttggagttataggtatttttaaagaataaatcctcaattccatcatcacttggcggggagggggcacttattaagcattttagataataaaactggttaagcttactctggtagaacagacaatcaaatctggggattgctgagaacaataataagctgaagtatggctcacagaatcctaacacaaatcattaagtctctagttagatttgttatcctaaaatttttcatagaattttaaaatctaattctgacttgtatggttaagaaaagcagttaaatattttactacttatcaagggcttttaaaataaataaatctgattgataggaagaaaggcaaataaatacctatgtagacattctataataacaaagagccatagatgataaaggaattagattttaatgtagaatgggtggtttctgaaacaaaggtatgtggtactttgtagttattgatgagaagccagtaaccagtagtgttttcctagatatatgcccaccctcacacaactttcttcattaacaaacattaaatatgcatttgtatcttattaaattatattgtataatgctgaaggaaaacaaaaagtgttcaaataatcataacttctacattacaggttctgtttagatgcagaactagaggggccagggtaaatgtagataaagagatatatagcaccatgcttcttaatgcttcatacttttgcaaacagaaaaaaaaagttttacttttattataaaacttcatctatggtcaaagtaaacactgttacatttaaattgctttttaaaaacaattgcgatctaaaaagtcaaaaatctgaaatttaataatatgagacttacactgaatataatgttcatttagaagttgctgtggtccacttcatttataaggaacaaatatttttacagtacactatagcaacagcaaaagccctctctcaccctgataggaatgggtttgctgggtgtctagaagttagattcctgctgaatagaattagccatccttaaaagattttaatccaatactgaactgtttataaaatgctttctctattgtaatgtactgtaagtagtgaaattctgtatatactgctattttctgtctgttcattgttgtgaacttcttatgtatattagtgaaataaattttcagctttcatgttgtttcctaaacattcataagtataactaactattaagagatttcttcctttcttgagtaacaaatttggtgattatattctttctgatccaaccccaaaaactagctattctgaaaaggctgatgttcactaatgggaagaatgaaatgacccttcacctcttaagggaaacaggcctccgccattccctttcaaaactatacttcttttacttgatactcaaaacttctgcaccaaaatcagtcagtatttttccagaatgcctttattttcagtatcatagaatttaaatacagagtcaaaagatgatttataaaatataaaacattttctgcttggccgtatttgaagacaagctgaatacatatctatgttctgaataagtccactatggatatatataggaagagatatacatatatccatccacagatacacacacacatatatatttctgcatgtatatatacataattctttctatagttacaggaaatacttcttctataattctgattttgactcccatcctccaccatttactcatccactcattacctaaatcttggctttctttcctatattgtaaataatccatccaaacttctagccagtactgtcaggagggttcttgctcgagtgagctgttaatactattttccactgacaacttctgcacatcgaggacacagtgtatctgaagactccgctgtatacttccaacaacgggggcatttttctttcgtagtcggcatgacaattactttataggaagactcttcacgaatatcaccacctataaaaaaatacatgaagagtatttctgataggcattcaacttgtaacactgtttcttaattggtttagcagaggcttctttttcagtcttttgtcctgccttggtaaagcttgtcagacacttccccatttgtcccattacatatatagccaagataatgggatcatacaactcaacacctgaagggagctgaggaattagagaccccgtgactctgagattaactgacatctcccaagtcaccgagttctacatctactcaggcagagcagactttctagctgttaaatttgggtatagttctgatgaatgacactgcctctccagctacatacttgactaagaatttttaaaagtcaaattatagtgacaactacagtgtcctcactcaaaatatctcgtgggacaaaaggaaccaaaaatatctccacaattaatactcttagacctcagattgataaaaatataaaactaagttattttctagtcattgtacaaagagtatgtgaacattacatggccrggcatggtggctcaagcctgtaatcccagcattttgggatgccgaggcgggtggatcacctgaggtcaggagttcaagaccagcctggccaacatggtgaaaccccatctctactaaaaatacaaaaattggccgggtgtggtggcaggcgcctgtaatcccagccacttgggaggctgaggcaagagaattgcttgaatctgggaggcggaggttgcggtaaaccaagattgcgccattgcactccagcctgggtgacaagcgaaattccgtccgaaagaaaaaattacacaaagtaaattaagccagaacttttactacacggtctatgctgccaagcccaaatttgaactgatgcctgtaagttagcttcccatctcctggtacccaaaagctatgaaaaacacaagcagcataagatacctgcttttttttttttttttttttttgagacggagtctcgctctgtcgcccaggctggagtgcagtggtgtgatctcagctcactgcaagctccgcctccggggttcacgccattctcccaccccagcctccccagcagatgggactacaggcacacgccgccacgcctggctaattttttttgtatttttagtagattcggggtttcactgtgttagccaggatggtctcaatctcctgacctcacgatccgcccgcctcggcctcccaaaatgctgggattacaggcatgagccaccgtgcccagcctatttttctttattaatgcaactctaccgctaccaatgaagatgaaccagactgacttttaaaatcttctataaaacaaatatcgacaaaatgcttgcttatgagataccattgttagaatgagctcaataaaacttcctccttaacccctcacaagaatggctaaatattttaatccggggtatacataataggaaattttagaatcaatactggggaacagtgggcaggactgggccagtactggggtactaagtatcaaagcagggggacacaaaagaggaatgggagcaagtcagcctaacataaacttcatatacagtgaccattatttattcaaaggacagaaagaaaatctctctccctcttctgtccctagccctcagttcccaagatcatcaggtaagatagttttaagagcgggcttagaaacttggcaattgtttttattatttccatagaaagatgtattccaagtatatatctacctttagaataaacccagtccactggaaagttggagatgacctataattattcaattctccagatgttacttgttactttcatctccttcttaccttctaagttgatgaggaatttccctttaagctcgattacatctgcagtcatctctcgtggttcctgagccagtaaagttgactcagaagccatcattaattcattcaactgagaggtgctggaagtctcttcagactgcagcatctggaaggaagcatgtgaaagttacagtttatgttaaatttgtaccataaactgaggttataaaaagaaacactataaaatctcacgtttagagaggaaccttctggtataccattgcatcctgagcaaacatcactaaatgtatcaatcctaattagcataaaaggttttaactaaatatttccatcaacagtatttattgagaatgccaggcacttcactttgctagatcctaagatgtctcttacttctaattgtcacatacatacacacaaaaaaaacctatatggtgtttattatcctcactttacaaatgaagaaacaagcaaagagaggttaacttgcccaagattctcaacccatacgtggtggaactgcaggtcaagcccaggtctgtcagcctcaaagcctttttttttttttttcatgtatcattgggtgaggggctaaaatactatctcaacaggtaccagcttttagtaatgtatactgatagtggcaatctgaacaatacgcagaacacttatgaagtagactgaatttgtctgatgaacacatttttctctgtaattttgatcttcaaagtgagtttgtaagctaaccaacatagacattcctttaaaaattaaagcccatgagaaataagagactcaaagagattaatttggttttaacaagtttatgcaattagtaatggatagaaccaggactccatcttacagctacttggtatgattcctaaggaaaatacattcatgtttttgaaaatcccaaagtattttttccaataaaattgatccaaacaagctgttcttcttttcagttcattacttagaaagactgaagacaaaggaaacacagtatgtaggaaaaaaggccaggactaggctgtgttaccctgtctaggtcacagcttcagcagtcctcacttcctcacttgtaaaatgaacagcttcccaagttttaaattttaaaatgggaaaatctcatctattatacctactagctatttcaagctcaaatcttaatcttgctaattacatcattaaaaatttaaattgagcttaccatacaaaataagatggatgttttttagaaaactgacactaataaaacttttaaaaaatagctcttccaccgtctttctgcaccaccacaatggtgcgcatgaatgtcctggctgatgctctcaagagcatcaacaatgccaaaaagagaggcaaaagccaggtgcttattaggccgtgctccaaagtcatcatcctgtttctcaccgtgatgatgaagcatggttacattggcaaatttgaaatcactgatggtcacagagctgggaaaattgttgtgaacctcacaggcaggctaaacaagtgtggagacatcagccccagatttgatgtgcaaagcaaagatctagaaaaatggcaaaataatctgcttccatcccgccagtttggtttcattgtactgacaacctcagctggcatcatggaccatgaagaagcaagatgaaaacacacaggagggaaaatcctgggattctttttctagggatgtaatacatatatttacaaataaaatgccccgtggaaaaaaaattatattcattgccaattctcttcttaagcatttagactgga

SEQ ID NO: 95283 - DNA, 92265 bp, Homo sapiens
  misc_feature (1)...(92265): n = A,T,C or G
ctgaatgcatggatcaaccaaacctggactctcctctttccccaacttcctactggatgagcaatacattactgtttgaaacagtctgagtcagggtttctcttatttgcagccaaaggcatcccacctgattcagctggtaaacaggggtgttaagatttgaattacatccaggcgtgagagaagtaatagctaaattcaacatgacagcaaggctggagccagaatgaatttgcaatacaagaactcaaaaagcttggcaatatacaacaggacaaatactatatgattccacttatctgagatatctaaaatagtcaaaaatcatgatattagaaagtgaaatattggttgcccaggacttgggggaggggaaatgccaaactgttactccatgggtgcaggatttcagttttgcaagatgaacaatttctagagatttattacacaatgtgaatatagttaacattactgaactgtatacttttaaaaggttagaaagataatttttatgtgttttgtcacaattttttaaaaagattggcaaactagagtcattcaggataaagaatcctacacacttcagagggcttaaagatgttaccctaggtatagaacattggcctccttgctcctcccatcttaaagcccttacactggttgtcctcttccctggaatgctctttccccaaatatgtacacaggcacatctctcagtgccttcaaatcttcgaatgtcactttctcactgaagcctaccctgaccaccatatttaaaactgcaaccacacctccccagaactcctgtttctcttaacttgctcaatttttttttcattttctcacgttacataatttacttattatgttacttattttgttatttattatctgcctccatcctctaaaacataagatccacaggaacagggacctttatctactttattctctgatgtatcccaaatgtctagactaatgcctgacacatagtcgactctcaataaatacttgccgaaagaatgtatgagcactgggaccaggtgtggtggttcacacctgtaatcccagcactctgggcagctgaggcaggcggatcatttgaggtcaggagttcaagaccagcctggccaacatggtgagatcccatctctactaaaaatacaaaacttagctgggcatactggtgctcatctataatcccagctacttgggaggctgaggcaggagaatctcttgaacccaggagacggaggctgcagtgagccaagatcgtgccactgcactccactccagctgagacacagtgagactctgtctcaaaaaaaagaaaaagaaaaaaaaaagtataagcattggtataaattttggtaactacagtcatcaaccagaaactttgtatacactgaggttataaaacatgaaaagtgacttctgcactaagatggcagatctaatcttgctcctgcccttaatgccacaaaaactataatcgagaggatgggagaacaggagaggagacaatccccccaaaaatgcaggaagccaaaaagcagcaggtgggccagtggtaacctacttagcagatatgaaaagctgaatcctaagggagcagtcaagaaagctgagaagtgacctcactcataccacagaaatcacaaaagactcaagacaagcagcaccaaatacctctggaaacggagatggggagtgggaatgataatgacaatttggggaaagttacaagagaagtctgattcctgcagccctccatactctactcttttggcaagagtcctctcctaccctgacatgatggattctgtagagaaggtaaaaggtgggtctttgacttcaggaactgggtactgtacccaactaggggaattcggtgaccaaatacatgtgggatgccagatattcccagaacactagcagtgagacctttattcttcatgcagcagatcagaagagctttctccctgaacaatctgactagccaaagggaaagatctaaaaatactgacacccatcaaatggcccacccagaccatcatgcagtaaaatccacaatggacaaaccccatggaagtgctcagagagcttctaatcagctttttagtctccccttttttttttttttttttgagacagagtctcgctctgtcacccaggttggagtgcagtggcgcaatctcggctcactgcaagctccacctcccgggttcacgccattctcctgtctcagcctcccaagtagctgggactacaggcgcctgccaccacgcctggctaattttttgtatttttagtagagacggggtttcacagtgttagtcaggatggtctcgatctcttgacctcataatctgcccgtctcggcctcccaaagtgctgggattacaggcgtgagccaccgcaccgggcctagtccccacttttaacataagcagacaatcaaggattcactgaacacctgaggtaggtctctaacatggaagacagaggccaaaaataaacaaatagaaaagcaacttgtaagaaaggggttatgtagagagaacgcttttaaaaattccccaaaaaatcactttattaatatgctcagtaagatgagaagatattatatacattttaaaagatcaggattctattcttttaaaggaccattcaaataacaaaaagagtgctttaggaaattattaaatgatggcaataatgggaaaaacgcaattgaaagactatatgataaagttgaaaaaatctcccaaaagcatatcaaaatgcagtaagatggaaaaatggagagaaattataaggaaattagaccagctcaggaagtccaatacttaataagaattcaggaaacagagaagagaagaaatggaaggtagagaatcatcaaagacttttttcaagaaaatgccccagaactaacgagcttccagatggaatggcccaatgtccagcacaatgataaatttaaacccccaggctgataaatattatgaaattcctgagcattaggaacaaagaaggacccatgtagtctacttagcagatgtcctgtgagcttctttcttttccagggggaaaagaaccacatacaaaggaccaagaatcaaagtggtggctgggcgcaatggctcacacctgtaatcccagcattttgggaagcctaggcggatggatcacttgagacccagagttcgagatcagcctgggcaacatgggaaaccccatgtctactaaaaaacaaaaaaattagctagtctcataacccagtcttgaaaaaaataaagaaataaaagaaccacaatggcacttcaaccctcttaacagcaacaactaggtccatggacctacccaaaagtcattttccagctccctaaatgtatagtttgggatggatattgtattggaaattggcagagtccgacgctgattcctgtcaagacaggaacacacaggacaagtaaggaaatgtcaaggcctgaatgattccatcagtaaagctgtaacatgctgcttttagatttagatggtttattacttacatagacagtgaaaacaagaataagcccccagcctggacaacatggtgaatccccatctctacaaaaaatacaaaaattagctgagcatggtggtgcacacccgtagtctcagctactccaaaggctgaggtgggaggaccccttgagcccgggaggtcggggctgcaatgagccttgatcgcaccactgcattccaacctgggcaacggagtgggaccctgcctcaaaaaaaaaaaaaaaaaaaggccaggtgcggtggttcactactgtaatcccagcactttgagaggctaaggcaggcggatcacctgaggtcaggagtttgagaccagcctggccaacatggtgaaaccatgcctactaaaaatacaaaaattagccaggcatggtggcgggcacctgtaatcccagctactcgggaggctgaggcaggagaatcacttgaacttgggaggtggaggttgcagtgagccaagatcatgacacttcacaccagcctgggagacaaagggacactctgtctcaaaaaaaaaaaaaattaaattaaaaaaaagagagagagaaagaagaataagccaaagttgccagctccctgtgattcttgtcccattaaggacatcactgaaacaaaaggcaccaaatgactgcaacatgagtagtgggacactctgttgcttaacagccacttctagactccagttaagcagtaagatattatatacatttttgtattctgcatttcccttgagggaagggggcaagaagtcccacacctcatcagaatctaggaggtagtaagaaaccatcccataacagcctctcagggagacagggaagtgagtgggagatggccttccaccctctcatgttccagcaggatcacaagatgtttttccaagattcaggttagctgcagttcccgcccttgcctacatggcttatgtggatcctgcaaagcagccagagcaccatagcagagctgttcccctattctttggtctgtggaataggctaccataccggataaagctaagaggaaatctctaaaagtcactttcccagcccccaactaggataggaaatcataaacaataacatgtccccaaggggaatagtggagatcagtgcaacccttaaagacgtaatggttggtagtctccatcacattcctattgtcaccggtgtggctccagcaaaaaccagacaaattcaggaacttgacagtagactactgcaagttcaaccaagtcacagcctcagttgcagctgtggtatctttactacagcagattcttaagacctcaggcatatgacatgtggccactgatctggcaaatgcttcttttctatcactatcaggaaaggaggccagaaacaagaatatatatttacagtcttattccaggactaaataagaatacttttatcaaggcaacggggccaaagtaagaaagaagtacatggacaggcctcatggacagatggaaaggtaagatcgctaccctagcaaagggataatagatgggatttgtattcagatttctgataaccagtccatacattaggactatacctgattgaggcaatccaagttttaaaaaaaattccaagatgaagcaacttcacagacccccttctgtattcgaatcccatgagtataatgggatgccttttttaacggaatgtgatactgatcatgaatattcagtgttgctccccaaggaatgagtaaattctcctgcccccatgaactcaggaatgacgatgtgacttgttctcgccaataaactaggagaatgtgaaatgtgtcacttccaggcagccattttaagagctaaattctcttcctgactctgtaataatggaagcatgtatcaagatggcgcatctatcagcctaggtacctgtgtaatattaagaacaggaactaggacttatctttttattgccagcacctgatagaatgcctggcacaaagtagatgtttgtaaataatctttgatcaattaaatagggaataaaatttcataccacctgcaattagaaggaaagctacaggcaagcaaggaccatggctgtcttctcactactccatgggggagcctccagagagagcctttcacttgcgctgggatctatgtgcaccccttaacactttgtgccagactaagacactaccaagtcagttgaaacgacggagtgcaaactctggcaggggaaacagtattaaaccaaatctccaaattattttcaatttcgattcaaaactcatgaatgatagcttttttaaaaaatcagttttttaaaaaagcctaacttggggatattcgcccattgggcaaccaacactatgcactgtccctaacactgcaacagatccaggcaatcaatgcaattgtatgcgtttcttgttgtcgttgccactgtatttacacctcacttacacagggactggtaacccatgctgccttggcaagccaactgcactcctctgtcccaacaagcagggcaatggattgcgaagaggcctcctccgtccccaagcagctacgtcgcccaggggaagagagaaggcgggaaagtccaagagaggagaaaccaaggcccgcgcttaggtgggtgttktagtgacgagtctgcggttacagccgagcggagttgaaagggctgttagaagaatggagcagaagtcgcagttgggacgaagctgaagagagctggcattcgcccaggtctacagccagccacctggtaacccctgcccccgcccccagagccaatccagcgaaactaccgcgaattcccgggaattccctccaactccgggaaaactcccggaggggcggggcaagagtgggaggagaccctgcgcgcggccgccagcgctccgggatctcgagatagccgcagctctcgcgatctttctggagccgcacctccacrcggagtccgagcgcgtgtgctgagacccsagggycgggagggcggagactgggagggagggagaagcccctttggcctgccttacggaagcctgcgagggagggtggtgtccactgcccagttccgtgtcccgatgcccagcgccagcgccagccgcaagagtcaggagaagccgcgggagatcatggacgcggcggaagtgggtttcctcctttcctgggcctgggaggacrgacccctgggccgggctgcgccgagggagggaggagggggagtggggccctacaggtccttgtcggcacgttctccgcaggctgcgggcgtggggtccgggcgcctagagcccttgccccagcagtggggccagaccctctccggaccgcgtttcttgcgggggtcacctgggagtttggcctactagaagcgtgtccccggggtggggaggacgggaagaaccagccgccccggaagtaggagcgcggcgtcacacttgagtctctctgggttaggcacgtcctgcacgtaatgcacaatccctgggaaaattttaataagcactagtaatcgatatgtactcagccctcgtgttcctaatgctttagcaagtaatgacagtacttagcaaaaccatctgccaatatgtttaatgaccatttcccatgtgacagctttaaagaacacatgtcatttttatttactttctccctctcagtgacccggtaaggtaggtaataggagttaccgagaatgcatttgaggtgaagtgaccccaaatcacgtggataattcataacacccagtgatccttcggtgcttttcagaaatcaaagtttgaaaccatcctacaagttatgtgtgctgtagtactgttaagccttaatttccgtctggctccctaatttttctataaggagttctgagtttgtggtaagcaacatgagaagtaaggtcatcttagaatactaaatgaggaagagtcactgaaatattaatagtactaattatgaatgcaacttttttgtccttcacacaatttaatctccttctgttgccctcaggcttcattgtgtgactgtatctctctactctggccagggttatctttttctttaaattgttcagtaagcgccttaaacatgtctggttttattttggtgtaaacacaaaatccagcaccctcctgctctaaaggagaggattccaacaggtagctgtaaagtgacagaaacttaattgtttcatacagatcttaagttaccttgtaaaaactagggcaattatttttgtgtactcttaatctgcttaattacataaactatcagtgtacccttacagatagtatasgtctagatacaaggtagacattgtggcagagttatgccattttatagctagaagaatcttagatcattttagaggtaaagtaagattgaaataaaggccacttatctatttaataagtatattttgttaacagattggaccctaggtcttctgtttcctgttcctaactctaatctgtaacaagaaatttgatattattatattgtcagtgtcaaactcctgtaacctggtatcctgaatctggtttttagaaacaggaagctggtgaattttttgatgatgttttacaaaaggaaagttgtagttagcttatacccagcatctccagtttctaaaaactgtggacatctggtgctcagaaagcttacccaaaacgttggttctctttgaacatttcttcctgtaataggaagttaataaaactgtggtacttcatcctactcccttcacagaggaaatttatgtccctgctttgaagtagtttcatctttttgaagaaggtagttaagatgtgttgtacatatgtgtaaattttatctgagaatgttattaagtatggtaaatccatctaggagtggtgatcttcaaaacaaactaaccagaaacagtacttttctgttttctgtagagtacatatgtaaatgaatgagagatttccacattatgaaactactgactttctgaattaataaaatgatcctgaaagttaaattcatttttatattctattattagtatttatgtgtttactgtgctcttagtgtttacataaaaagtcacgatgcaaaaaactttttttgtaggattatgctaaagagagatatggaatatcttcaatgatacaatcacaagaaaaaccaggttagtagctatgtgacagtaaataaagcttttttgctttctaattccaggaaagctctaaatgaarttttaagtaaggttggcataaatctgaaggtataattctgaaaagcttaaatgacattaataatccaagtagatgtcataaccctgtgtaaacattgtcagtttagggttccaactctagaaaaggaaaaaaaatgttattaggtattgtaggttaaatggtatgttttaaatggtagattatattttttaaatattcctaaattattaggtaagattcaaccgttgtctaggagataggagagtggctaataactgccttcatcacatgtagcctttttgcatgctttaataaagctacctcttttacttcccccaacccccacaactttacttctctgactgtttttagctattatttattcctattttgcttgactcttcccaaacatttatattttcacttattctctacagcatccttgaaaactaaggaaccaaagttgaaagataagaaacttgacttacacagagtctgccagacttgggattagaaccaaaggccatctgaccctagagtccatgggtccttccatcttacatcttctctggcttctttggcagtactatgatttgagttttaaagcctccacccccactccattttgtttactcgtagctttagtgtctgggaatgaaatgaattattcttagaccccagtctatcttttcttataaccgctcttttttgttagtgtatgttggcatctttatatttcttttttttttttttgggagacagaggctcgctctgtcgcccaggctggagtgcagtggcatgatctcggctcacttcaacttccgcctcccaagttcctacaattctcctgcctcagcctcctgagcagctgggactacaggcgcacaccrccacgcctcactttttttttgtattttagtagagatggggtttcactgtgttgcccaggctgatctcgaactcctgaactcaaggcaatccacccacctcggcctcccaaagtgctaggattacaggtgtgagccaccgcacccggccttatatttctttgaaattgacctgactcatgttgtttctctcagacctgtagattttttatttataaatgtttgcctttcttttacttctattctatatatgtaatttcaacagatttgtcttacttaactatttgacagtaatttttcttttggtagacacttcaaattacgtctctcactctttggtgcagtaattgtagacgtttacattcttgcccattggaagcactgcttccagtttagagggctgcctatgaatattatgctttggaaataaaacacctctaggttaattttattgttatatttgatttgccacatgatcacaaaatcacttttctttcccaggcttgttgggaaagaatacaataaaagaccaaaattcagagactgagttgggaggatcacttgagcccaggaatttgaaactagcctgggaaacatagtgagaccccatctctacagaaagtaaaaaaattagctaggcgtggtggcatacaccttttatcccagctactcaggaggctgatgggaggatcacttgagcctgtgaggtcaaggctgcggtgagccacgatcacaccactggacttcagcctgggcaacagagtgagaccctgtcaaaaaaaaaaaaaagccaaaatttctgaaaatcatttccaaaacataaagatgaaataaagtaattgagtacaggttgagtatcccttagccaaaatgcttgagaccacaaaagtgttttggactttatttttttggactttggaatatttgcattatatttaccacttgagcatccctaatctgaaaatccaaaatcctccgatgagcatctcctttgaccatcatgtcagcactcaaaaagttttggatttgggagcattccgggttttcgggttaggaatgctcaacctatgtaaaatagactatgagcaatagagtataggggatgatattcctctgccagggcaagcaggaggagacacttgagactttgttttcaggttaggtgtctttctcaactgtacttccttgagctgtaacacaaagaagctcactggagtttaggtctttaacataggcccaaagcagccattaacataattgctgttgttcttttgctggcaaatccacagacagttgcgttcttccacttagagagaaagataacctatgtatgtaaaattcggcctttggttttacctctgcaaaaatgccaattctttgctcaaggtggtttcctttctcatctgcttccatttctctgcattaatcactctgatgcccatgactcttaaaagtgcagttttcaaactgaaatcctactaccttggttgttactggttagccagtcatagtgatgtgagtatggcatgggcttcgggtatgttcgggtgtattaaaggttgagaacccctatgctagttaattgccatgccacaagaaagaagagccattaccctttttcttctccaaagtgctagtaaaattatcctaattatcgcatatctcttagacttctgcttttctgttttgtgtggttttgagttgtgattgcttggttagccattgctttttcagtcttggcattttcaaatctgccttttaaaatcttctgctgatgtgtctgtcttttctctttcacgctttcttttgcctgagtttacacagcagacttggaagttggcttaactcataaagtctgttggcagtgttttgcagaaatcctcttgtgatgccagtggctttaaaattcctctttcattctctttgcttttggctatgagaaccgtgttatttattctcctgtaaatcagattctctctgcagctgcatcttttcttcaataggcaaattataaatacatttagaaaaattcggtaagacatacagtatttataatttgactttatgtctcaaaaggtattctcgatattgtaatgtcatgtctattgctatgtttaatttaactaatacttaaatgtttttctctaatcaaatgattgcatttagaagagtagcaaaaatgattgttgaatgttgcgttgtatacacatctttacataacagttgttttgtagctgttttcctgtttaggaactctagatgaatgtagtattttgtttagtattaggagcataatagttggggctcacttacagccaaaaggctcgatagggaaatgtatgagatgacatcaagcatgattggatcttggggctcaggaagcatcwacaggcctttctctctccagcttttggctctgtttcctttaggatattggcctccttctcgaatcctgcaaacatagcaggaaaggtgaaagctgcagccctgggcctgcaccatgtcagcgcagcaatcccaggaaagagagcttcattcccagcatctgtatatttagtcccagagaaagacttkcattagctcagttagagtcactgcatcctggggaataggatactgcgactgttcagacttggtagagactagctgacttaggtactgtggcaggcaggcaaaagttccatgtcctaggcaggataggctgtgtttggccttacaagtcattgaagtgttcagatttgcattttgaaactgtctgacttcaaaggagactgaattagaaggggacacagggattgcagttaggaagctattgctgtagttcaggtgggagacaatagcttggtttagtatggcggcagtgaagatggtagagaaatagacggattttaaaaatatgtttagaaagcacagttcacaaaacttgaggcaaattgcacatggmacatgatagagaagacagtgttgtcaaagattgagaattattcaggatggttccaagtacttatgctagctgtcaaaaataattatgatctctttgtaaattctgaatttaaaaattattttactatataaaaatcgtttactgttattacagatcgagttttggttcgggttagagacttgacaatacaaaaagctgatgaagttgtttgggtacgtgcaagagttcatacaagcagagctaaaggtaggattggtttcattattaaagctctttcggtaaggactccgaattttttgtcttacatattcctcacagaccaaagtaaatctttaaaaacaaaacaaaaacatgtaacttttctttcttaaaagtcactgtaaagtattaacccatggttaatcaattttagattcctgtaaaacatccttacaaataatttgaccctaaagactgatgaaatctaagacttcaagctacttttctagcatcgctctaaagtttaattattttcagctggagaaggagtagctaaaaaaaaaaaaaaattgaaaaaaaagagtaaactttaattatttaagtgamgagtgtttttgagaaacttcccgtttgttaatatttttatatttgtaattatctagatgaggagagaagtgaacaaaagataagactgggcaattcaatacagtaaccactgaccacatgcagctatttacatttaaattcagtaattccgtcacactagctgtatttcaagagcttaatgaccacatgtggctaacggctcccattttggacagacagcacaaatacagaatattctcatcatagaaagttctttcagacagtgctaaaaatttagcctcaacaacagagaagaaacgttaggatcatttagacagaccctgttcttatagaaaattggcctactgtagtgttcagaattgtctaaaaatatcaattgacacaytagtttataactttatacttttcatactttttcacatttgatcatccctgcaagtttgtgaagtaggcagaacaagcattcctattccactttataaatgaggaaacacgttcagaatgaarctacttgcccaaagtctcatagtaattggtggagtataaacagaagctagaagctttctaagacatctccgtctctttagcagagttctttgcttctgtagtatttaatatgtcccatgataatagcattttttaattgtgttttataatatttttattgtagaattaatacatgcccattattttaaaaattctactttgcttctatagtatttaatatgtcccatgatatatagcatttctttccttttttctttttttctttttttttttttttttttttttgagacagagtcttgctctgtcacccaggctggagtgctgtgttgcgatctcggctcactgcaatctctgcctccagggttcaagtgattctcctgtctcagcctcccaagtagctgggattacaggcatgcgccaccatgcctggcaaagttttgcatttttagtagagacagagtttcaccatgttggccaggctggtcttgaactcccgacctcaggtgatcctctcgccttggcctcccaaagtgctgggattacaggcataagtcactgcacccagccgatagagcatttcttaattgtgttttataatttttttattgtagaattaatacatgcccattatttttaaaattccagcactttatacatacatttcactcttagggccaccattgttaagagtttgtctattctttcagtatcctcccctgatgaatactgacagactttgagaagagtactggtggagttttaaattttcaaataatgttgatttgccttcctgaaaggttgggccatttattctgccaatagtcagtcacattgtattataatccttcatttactcrtctctctcccgttrtactgagagcctttgttctgtccaaatggggcactttttcctaaacatagtaatttagcaaattaaaagatagaatgcatgctacaagtaagcctgaaccaagaatatttcccttcacacccatccctttattttacgactgccatgtctgtttcttcttaacagttaaaactcatgagtgatacttcccagtggttatgaataagaccttttcagtgagacagatgtgtgtttgaatcctggatttgtgcttacaatctgtttactctacgcaaattgcataacctttccaatcctcagtgtcttctcttaaaacaagtatatattaatacctagcttataagatgttatgtagtaatatttataaagtatttagctctatgcttggtgcagtgtaagccttcgataattgagtcatgttaatgagcatgacagttacttacttgccttccatcgtagttttttgtgggtcttatttcctgttgtcagctcttggaaggtgctactgcttaytttcttgctttgtttggtacacaacacataataagaaccctaccgaataatagatgaataaaacaggtgttttatacacatataatagagcattgtcttctgggtcttgttcttgctgtccagtagctcactctaattgagatcagcatgtaagtatgaagcatcacgtaagtgaaaaaatatacaggttgagtatcccttatccagaatgcttgggactggaagtgttttggattttggattttttttttttttttttttggaatatttgcattactggctgagcatcccaaatctgaaatccaaaatgctccaatgagcatgttttttgagagtcrtgtcggcactcaaaaagtttttggattttgaaacattgcacattttcggatttgagaatgttcttcctgtaccatctgctagtgtttttttttccatttgtgacaaattattttagtctcttaattgatagtgcctcctgcctcaaaacatgaaacaaattgcaaggtgtaaggactttattgatgatatgagctaatcatggtgggtggatagggagaatttatgagtgtcaatgttatgaacagactgaacggtttaaaactttcttaagagtttttaattgaggaatttcatagcactttttattagtatattaactgttattctatctcaaaaaaataaattatttatgggtattggggaattttggaggggctaaatgctaattgcactattttaaaactcaaacagcacaaaaactaaagaataaagcagaaagtgtaattcacttgttctgctcccaagagaataaaaacactgtgaaagtttgaaatgatagaaattgctttaaacaaaaattgatactttttcttttacaaaagtgagttcatatgctgtatcagtgttttatgtagctctacatgatcatttacaatatttttaatttgcaaaattgaaaaatttattctagattataaaagtaataaccattttttgttaaatactcaagcattatagaattaaatcaggtataaagtggaaaactgactgtaatccttctttacagatttgtgggtttttttggttggtttgtttgaggtggagtcttgccctgtcactcaggctggagtgcagtgaggcaatctcagctcattgcaacctctgcctcctgggttgaagcaattctcgtgcctcagcctcccaagtagctgggattacaggtacctgccaccacatccagctaatttttgtatttctagtagagatgagggcttttttttttttttttttgagtcagggtcttgccctgtcacacaggctggagtgcagtggtgtggtctcggttcactgcagcctccttagctaggactacaggcatgcgccaccatgcccagctgatttttgtatttttagtagagacaagggtctcaccatgttggccagggtggtctcaaactcctgacctcaggtgatctgcctacctcgacctcccaaagkgctgggattacaggcttcagccactgtacccagcctcagatttgtttttatgaggaagttgagggtcaatgtgagtgtatatgtgtgtttgagctaaaatttttataatactctgtattattttataacttgcacttttctttatcttttggatatcttttcatgtctgtgcgtataggttttttttgtttgtttgttttttgagayagagtctcgctctgtcgcccaggctggagtgcagtggcacagtctccgctcactgcaaactccgcctcccaggttcacatcattctcctgcctcagcctcccaagtagctgggactacagacacctgccaccacgccyggctaatttttttgtatttttagtagagacggggtttcactatgttagccagaatggtctcgatctcctgaccttgtgatccacccacctcagcctcccaaagtgctgggattacaggcgtgagccactatgcccggccgcatcattgttttttaatggtttcatagtatttcatagtatggctatatttttttacatatattttatttttctcatttgtataaagttcagatttatccattgttgctttaatttgtgtttcagtcattggttagattaaacttcttttcctgatatgttaactattttgaacttcttttatatattgtttgttcttgccctgttcctattttattaaaaaagaacaaataattttctccaagtctgtttgcatttcagttttttgaggcgaagagaggcattacaaatgatgatcattatgtccttttctttcaaatgtttgtatctcatttcttgtttctctttgcaatactagtaggttctctagtacttcagggattcacacaatgaagaatttttgaaagagcagaaattccrgttctaaatgaatgattttgagtttaaggttctacataaaatgtcattagaaaataaatggcaaagttttaaaaagtagattaaaagtagtttcccagccaagttttctgtttgtcaggaggagatgttgaattttatcagacctttttctagcatttcttcccttcaaaatataattgtgttatgtgatgtatatgtagagaggttcattatactattcactctgcttttgtgtttgttggaaattttctgtgtaataaaataaattttaacgtagttgatcctcattattcgtggactgcatattsgcaaattcacctactggctaaaatgtatttataaccccagaacacttgcagcacttttgtggtcattctcagtcatgccagacctgtacatgtgcagagtggcagagtatttgcgtcatccagtacacacattcccaattaaagtcaaacacagtaatgttctgccttcttgtttcagctctcatactgtaaataagcgtccctttcacagtctctttaatgccacatttatgccttttaaaaaaggacttttaaaaactttygtgtgggtacatagtaggtgtatatatttttggggtacataataggtgtatatatttatgaggtacttgaaatattttgaaacaggcatgcagtgtgtaataatcacatcatagaagattgggtatgcatcccctcaagcatttattctttgtgttacatacaatccagttatattcttttaattatttttattttttaaattttatttattttttgagacaagtatggcccaggctggcgtgcagccgtgtgatctcaactcactgcacctgtggctcctaggctcaagccatcctcccacagcctcctgagtagctgggactacaggcacatgtcaccacgcccagctaatttttattttttattttttcattttttttgtaaagatggggttttgccatgttgcccaggctggtctgaaactcatgagctcaagctatctatccacctcagcctcccaaagtgcttggattacaggtgtgagccaccacgacacccagtcattcttttagttatttttaaatgtacaattattattggctgtagtccccctgttctgctatcaaatactaggtcttactcattctttttttttttggtacccattaattttcccagggccccccaccttcaacccctattacccttcccagcctctgttaactatctttctattctctatatccatgagttcaattgttttgattttaagatcccacaagtaagtgagaatatgcgatgtttgtctttctgtgcctggcttatttcacttaaaatgacctccagttccatctatgttgttgcagatgataggatctcattcttttttatggctggatagtactccattgtgtatatgtagcacattttctttatccattcatctgttgatggatacttaggttgcttccaaatattggctgttgtgaatgctgctgcagtaaacatgagagtgcagatatctcttcgatacactgatttcctttcttttgggtatatacccaacagtgggattgctggatcatgtggtaactctatttttagttttttgaggaacctccaaactgttctacatagtgattgtactaatttacattcccaccagcagtgtaccagggttccccttcctccacatcctcaccagcatttgttatttgactttttgatataagcctttttaactgaaaggagatgatacctcattgtagttttgatttgcattcctctgaagatcagtgatgatgagcactttttcatatgcctttttgccatttgtatgtcttcttttgagaaatgtctatttaaatcttttgcccattttaaaattgtattagatttttttcctgtagagttgcttgagctccttatgtattctggttagtaattcctcgtcagatgggtagtttgtaaatactttgtcccattctgtgggttgtctcttcactttgttgattgttacctttactgtgcagaagctttttaacttgatgtgatcccatttgtccatttctacttcagttgcctgtgcttgtggagtattactcaagaaatttttgcccagaccagtgtcctagagggtttccccaatgttttcttgtagtattatagttcaaagtcttagatttaagtcttcaattcattgtgattgatttttatataaggtaagagatgggatcaagttttagtcttttgcatatggatatccagttttcccagcaccgtttattgaaaagactattttcccccatgtatgttattggcacctttgtcaaaaatgagtttactgtagatgtgtggatctgcttctggattctctcttctgttccactggtctgtgtgtctgtttttatgccagtaccaagttgtttttggttactatagctccgtagtataatttgaaggtaagtagtgtgattcctccagttttattatttttgctcagcatagctttggctattctaggtcttttgtgatttcatgtaaattttaggatttttttttctatttctgtggagaatgtcattggcattttgatagggattgcactgaatatgtagattactttgagtagtatttaacaatattgattcttcccatccatgaacatggaatatctttccattttttgtgtttcctcttcaatttctttcaatagtgttctatagtttttagagatctttcacttctttggttaattcctaggtgtttaattttatttgtggttattgtatgtgggattacttttttttatttctttttcacattgttcactattggcatatagaaaaatgctactgacatttatatgttgattttgtatccttcaactttactgattactgaatttatccgttctgataggttttgctggagtctttaggtttttccaaatataagatcatagcatccacaaaaaaggataattttacttcttcctttccaatttggatgccctytatttttttctcttatctgattgctctagctaagatttctagtcctatgttgaataacagtggtgaaaatgagcatccttgtcgtgttccagatctaagagaaaaggatttcagtttttcctcattcagtacaatactagctgtgtgtctgtcgtatatggcttttattatgttaaggtatgttccttctatgcccagtttttggggggtttttatcatgaagggatttgaactttatcagctgcttttttagcatcagttggaaatgatcatatcgcttttgtccttcatcctgttgatacaatgtattacattgattgatttgtatattttgaacctccttgcatccctgagataaatcccacttggtcacgatgaatgatctttttaccgtattgttgaatttggtttgctagtattttgttgaggatttttgcatcagtatttatcagagatagtggtctgtagttttctttttctgatctatctttggttttggtgccagggtaatactggcctcttagaatgagtttggaagtattttctcttcctctgttttttggaacagtttgagtaggattggtgtgagtcctttaaatgtttagtagaattcagcagtaaagccatcaggtcctgggcttttctttattgggagactttttattacggctttaatcttgttgtttgttactggtctgctcagattttggatttcttcatggttcaatcttggtaggttgtatgtgtctagaaatgtccatttcttctagattttccaacttattggcatatattgcttatagtagccactaatcttttgaatttctatggtatcagttgtaatgtctcctttttcatctctaattttatttatttaggtcttttctcttttttccttagtctggctaaaagcttgtcatttttgtttatcttttcaaaaaaccaactttttgtttcattgatcttttatattgtttcctttatttcaaattcatttatttctgctctgatctttattagttcttctgattttgggttcagtttatacttttctagttctttaagatgcattgttaggttatttgaagttctttttttaggtagatacttataattttcctcttagtacagctttcactgtatcccatatgttttggcatgttgtttccattatcatttgtttcaagaaattttttgatttccttaatttcttcattgacccactggtcatcccagagcatattgtttaatttccatgtgtttatatagtttccagaatttctcattattgatttgtagtgttattctgttgtggtccaagaagatgcttaatgggctcttttttttttttttttttttttttgagacagggtctcactatgttgcccaggctagagtacagtggttattcacaggtatgattgcagcgcactgcagcctccaactcttggcctcatacaatcctcctgcctcaccctcccaagtagctgcgactgtagttatgcaccactgtgcccagcttgcttttgccttttaaaatggccccaagtatggttctcaaatgtttctaaagttcggaagcacaagaagactgtgctgttcccttaagaagaaaatacctgtgtttagatatgctttgtttaggcatgagttacagtgcccttggccatgagttaagtgttaatggctcaccaatatatattaaggtatctttaaacagaaacacacacaaaagaaggttatgtattaatcagttggcaaaaatattgtgaccataagcgtgaagaaacctaaccctaaacttccctcaggagcaatgattcagtatgccctaattcagtattgtggcagctttacagagcataacttctataaataacaagaatcaactttatgtaattgcagtgagtgacaataatgtattttataacattgaaccatttttagattctttgaataaactcaatttggcaaaggtgcgggtggcttttttttttttagtatagtgcttgtttaacttactttttgtggaattttgcatttataatctggtcttcatcatttttaactggaaaattctattctaagttataatacttaatgtaagttactcaaataatacattaatacttgcacacgaatctttaaaagaatacagaaataatgatactcccttttttcttctatactacctatcctctgccccaaccttttctattcattcttttttttattattcattcttaatttgttctgtgtctttccaaatctttataatgcacgtatgtgcacatacacacccacacacacagtttgttttattttggatgtgtgtatgtttaatatgtcttgttatactttacatattatttttcaactttttaaaataattaacagtgtttcttggaaacccttccatgataactagttacagatctacacgaggtagtatttctccaagatgggtgtatagaaatgaaattgctgggttaaagggcatgcatatgcatttttaaaatttctaatactagatcatcctcccaagaggttgtattcaaatatattcccacaggtatgtcacagtaccactttctccacatccttgctgccatggtttcrttatttttcccatgctatattgaaacttaatcctggtcaggcacggtggctcacatgtgtaatcccagcaccttcaggggcttaggcagggtggatcacttgaatccaggagttcaagaccagcctggccaacatggtaaaaccccatctctactaaaaatacaaaaaatagcygggcatcatggcacacgcctgtaatcccagctacctgggagtctgaggcatgagaatcacttgaacccaggaggcggaggttgcagtgagctgagatcgcaccactacactccagcctgggtgacagagtgagactctgtctcaaaaaaaaaaaaaaaaaaaaagctgaatccccagtgtggcattgttgaaaggtgaggcctttaagaggtgattgggtcatgagggctctacccccttgaatggattatcacaggagtggcattagtgactttataaggagacctaaactagcacactcagcttttcaccttgatgccctctgccaccttagggctctgcagagtccccaccagcaagaaggcacttacaagttgtgtcccttcaactttggacttcccagcctccagaactttaaaaaaataagtttgtttccatataaattacccaatttcagatactctgttacaagcaacagaaaacgtactgagacacttgtcagcagtgattgtcagtgttttttatttctgccaatgtagattatctttatttattttttgaaacagagtcttgctctgttgcccaggctggagtgcagtgatatgatctcaactcactgcaacctccacctgccsggttcaagtgattctcctgccttagcctcccaagtagctggctgggactacaggcatgcaccaccatatccagctaatttttatatttttagtagagtcggggtttcaccattttggccaggctagtctcaaactcctgacctcaggtgatctgyccaccttggcctcccaaagtgctgggattacagatgtgagccactgcccccggccgtagattgtgtttaagaataaaatcttgtgctctgaatttgcaaaaaccctgattgctagtaccctcttcttcctatatcttatgtacgaaaaatcatatcaataaatatgacttacttgggatcgtttgtgtgctttaaccccaggagtaatatattaaagctgggcttcaagaaacaactcatggtggcagtttctagtagagcaaagccctgagaaactgtgaataaggaaatggaagtgtcaaaatcctagtgtcaaaagtatgacatttagaatcctataatgcaaaaataagagtctcttcgtataaaaaaacaaaacaagaaaagcctgtatattttttccttaagggcagtgtttcagacattttttaaaatgaaaatcagatttcttatggtaggtttatatataacatccctaaagtgaagtgttttaaataggagcaaggagaaatttcttaccttaatgatatgcttaaaattagtttctttcaagcgtgaaacatatgagcataagtctgcatattgaaagagtaattggaatgtctgtcattcctttcaaattttatacgtaccatgtggaaggcactggcacaaaataattatttcagcactattcttcctaaaaacttacttacacttccaaaataacttcaacttaaatctatgcaggaacatttcaggggaagcaataagtggaaaatacttcagaacgttgagatctttgttgttttaatccctaattgattaatacaaatcatgaaggaaaatattaaggttggatattaggaagttaaggtacattatctaaataatgaatccagggggcttagcaagctaaaagtcagcaggaagagatgaaaacataggattgcctcacatctttgatactctggttctcccatgaaggcctatttcattgctgagccatcaccataatggagctgagaagaaactttttgtcctaactacctaccatgtttgttcttcagctcagaaataaagacttcacgataaaaaatttctgactttacatttttctaaaacactacatccatataaacttaagaaataaactgcttcttctgaaaacttaatcaaaatgcagcacaaagttttaagtgttaagaatttaaatttaaaatatcaaaagatagaccaggcttgtaatctcaacactttgggaggctgaggcaggtggatcacttgaagtcaggagttcgagaccagcctgaccamcatggtgaaactccatctctactaaaaaaatacaaaaattagttaggcatgggattacacgcttgtaatcccagctactcgagagactgaggcaggagaatcacttgaacccaggaggcagaggttgcagtcatcgtgccattactctccagcctggacaacagagcaagactctgtctcaacaaaacaaaacaaaacaaaaacaaataaaatatcaaaagatagttcattcagctgttttgaacactgactttgttttctataaactgtcttttgtgttggaaagttccaagaagaaagattaataatatttagcagttgattaatctgccctctaaagttcatataccagcttttcaagtgagaactttttactaaactgaggaattatatatttgcttcttaaaatagaaagtaatttatgggtatggtaaaaataaaaattccagtagtagaaaaagatatggaaatagaggtctcacgattctcctccatctcaccacagtctcttccctgcaaaatagccactgttctttcttgtgtgttcttgcagaaaaaaaaaaaaaaatacatttacagacagacaaaatatacatacagacatgaccatattttttgttttttaaatttgcacaaaaaggatcatgtacacactgctcctgtttatctctcagcatgtggaaggtagtgccttgtaaaacatggaactaagctaatcatgcagtaaggtgtgtcaccaaccagagccaaagaaagaacaattttgtttcctaatacatgacaagagcttggtctcaaaagtrcttcatagagaagtagtctgagtggacagttctatttaccagggagccagtactgatggtttgtttgtttgtttgagtcctttaaaaatcattttaagtggaccatcaaggttcttgtattttaaagtgctttgaacgtagaaagcttgaggaccatagcattagtcacaagtagttctgtttcaatttccttaacatatattctaaaaaatgtatttattgagtcaaagataacgtttttaagccttttaatgcttattgccaaattgttctccagaagcattacacaaatttaccctgccttcagcaagttataaaggaacggttttacgattttaattctcccaagcattgagtaataattcgattttatattttgtattttttaaatctttgctcatttgagaggtaaataatctgtcgttgtttgcttcaacttgcattacttgcattaccagtaacatttttttccttatacggtatttacttactatggtttttttcttgttccttcagattatctgttttggtctattgcctgtttatctattgggatctcagtgttcttttctcataaatctttaagatccttatgtattaaaaagattaatttatataggttatatgctgttcagcacttattttttctcagtgttattgttcctttgatttattttgtatatagatgttctttcattcttaaacttagaaagttttcccttcctccgtgatatagtttaatattcagttccattttttactctgtattcgttggggtgtttgtttaaatttcgtaatgtcctgaattctgtttagaattaggatctcctttatctaatacggtctattatcaattttttcttatgttctattgatctggttatttttgtactggcacacttttacatactatatasgtttttgtaaaacaatatgctcatagactgttctcactacttcattcccttcctcccccatctgttgcctttttttaataagaaaaattttttagaattaaatctaataagcacagtaaacatttaaagggtatagtgaacattcttcacttcyttttttttttttttttttttttgaggtggagtcttgctctgttacccaggctggagtgcagtgacacgatctcagctcattgcaacctccgcctgctgggttcaagcaattctcctgcctcaacctcccaagtagttggtattacaggcacctgccaccacgcccggctaatatttgcatttttagtagagatggggtttcaccacgttggccaacctagtctcgaactcctgacctcaagtgatccgcccacctcggcctcccagagtgctgggattacaggcgtgagccaacatgactggccttcacttcacttataaccgttgattttctttcttttctctagcaggcatgcaaatcttaggaggtacatttgctcctatgtttagctgtctaaaacttcccgggttctacttactgcttgtgtttaattttgaacttggccaaaatttcctttcagcccttacctttcttctgtacctacctgtgagtgtatagttctcttaaaaaatttttattctgattagaaaagtagtgcatatttattgtagaaagttcagaaaatacagaaaaatacagggacagaacaatttcctataatttcaccattcattggtagccacattttggtggtttttttccccatatgatcaatcttaatatacttcttacacaaacaaaattgggattacacgttacatatggttttatcactttttcctcatgtaagagtctatcatgattttctaacaaatacttacgttcgtgttcccagcgccctgcatactttttgtatatagtcatccagctgtgaaaaaggaatgataatyaatcatcaaataagtagtcagtggtagtggtgttactaataatagtcattaaggccaggygcagtggctcacgcctgtaatcccggcactttgggaggccaaggcgggtggatcacctggggtcacgagttcgagaccagcctgaccaatatggtgaagcccccgtctctactacaaatacaaaaattagccaggtgtggtggtaggcacttgtagtcccagctactcaggaggctgagacaggagaattgcttgaacccagaaggtggaggttgcagtgagccgagattatgccattgcattccagcctgggcaacagagcgagatgccatctcaaaaaaaaaaaaagaagtcattaataggccaggcgcgatggctcacacctgtaatcccagcactttgggaggctgaggtgggtggatcacctgaggtcaggagttcgagaccagcctggccaacatggtgaaaccccatctctgctaaaaatacaaaaattagctaggcctggtggcacgtgcctgtaatcccagctacacaagaggctgaggcaggagaatcgcttgaacccggggggcggaggttgcagtgagctgaggtagcgccattggactccagcctgggcaacaagagcaaaactccatctcaaaaaaaaaaaaaagtcattaatagttaacattaattgggctccgtctcaactttaaacatattataaaatccttatgattatgaaagaaaacctcatgactcttaccgtctccattttccagatgaagaactgagatataaagtggtttaataattttcccacaggccccttcataggaagtgataggatatgataccaggccttttgatttcaaagcttttacttttttttctaccagacacactaattgttaccccctagtgccgacccatagacttatcctgtgctcaccctttgtaagtcctttagagttctccattctttctccagggtctttgtgtagcactgaaattatcactggacagctttgtgaggcagctaggttggtgctgcttctgtctggactattagagtagctaatacactctgactacattatggcttagcctagcactgtcgtgtgcacattaccttccatttcacagtaacatacttttctaagtggggtaacgtggctgtggtttcagtagtagttcctaggaaaatgttatttttattcatctgcaagtttctctgtggtaataacctttgtccttccaatattttaaaactmctttgaatttgtttcctgtattaatacaacttcgttttttaggattttactttgtgactggatcatcctccaaagcaaaagggaaaattaagagtgttttttagtggttaaaaacctgccaatcatatatgactctaaagtcaatagattatgtctgtgttgacactktgtttgcaacctgtcttttttaacttgtgattgctatctgatttgcatttcaaaatactgtatgttgaaagtagtaactgtaagtctgcttgcatttttgctttcctttttctttcttcttttggttaaggcccattctaaatgtaaaatataakgctcagtttaaaaaacaaaatcttgtgatgttttacaaaacaatctgatgtgtaaagtggtcttggagagattaacccattttttatgaagaagtaatttcccagaatttgatcagagacttaagaaggatctgctttggaggaaaaagggatgtcacaaggatacataataacgaaatatattatgaataatgtttttcagaaggttaagaataaggagtaacagttctttatcaaagaagaaggaataaagaggcccaggatatgtaaaaataaaactggttatagggcttgaagaaaatgatctttaatagacaatataagttatttggagtaaaaaaaaatgcgagactcataaaatatgaaggactaggaaggtgataaaggaaaaatgaagaacgtagaacatgaaaggcactagcctgtcaatttaaatgctctttaaaatgtactttggtaggaagaaactctgtagatggaccaccccatagtgtttgtgtccttgtttttaagcactgtgttagcacttttgtggttgcagtattgaaacttccatagtagtacagtgcctttgcatgtggaatatactaactattgaatgaatgttgaaagtgatctcaagttacttgaaatttgtttaataaatcaatgcaatgacaaaataattttcttgatttagaagtttttttgaaattggtgatttgcctgtgttcttataacaagttgaaagcatttcttgttactcatcataggaacttgagtttctttaagggttgtcagttgagtgtgagtattttgtctgtggaagccaaatggatagtatacacatgcatgcgtgcctgatgagtatagtaaattttggcccacttttaaagtagagagcattttccttctttgtaaaacctgaagttgcrtgtccttaatacatttgtgttctttctgtctttttcagggaaacagtgcttcttagtcctacgtcagcagcagtttaatgtccaggctcttgtggcggtgggagaccatgcaagcaagcagatggttaaatttgctgccaagtaagtaagcaattatatcctgttgtcagaataaacartggtgggaaccaagactcccaggggtttggaccattttcatacattaacatcaatgcttcgtttgtttaaaaatgtagttatttaaattgtcagttcagtgttgctgaatacattaaacttacaaaagagaaaatatggagcacaggcttgaaattcatttggaactgctgaagcagcactctctacagacaagtcacatttactttcaagtagagtaacaaaaagcctggcagcctcaacatagcagagcaactttattttgttgtgtttgttgagcttcatttcctccctccttccctccctcccccagtttgagatttgcatgttgagcaacaagttttctaaccaaaaaataaaagtatataaaataaaagaatgtagtttggcaaatgattgcctccagaaggaagtaaaacaaatgttttacaacttttagctttgacaccaaaagggtttaggagaaaaaaggtaaaacttgctttttcctcctgtaaaagtctgggctgtctggctcagagttcccgtagaagcagcacattgttttgttcagcttgcaggaggcagatatagagatagaagtgtggttgtgtgtgcagtggctctaaggtgatgagagctgttttacttggtagtggtgatgtggctaattttgtttcatgttttttttcaatttcatcagaattttatttccatgataatgatctcagaaaacatgagaaaatggatggtctttgtgttttaagtaataaagtaatttcatagtgtgtaagtgttttttaaaagaaagaattcaatcagagtaaatgatatattttttctattgatttttttaaatgtttgctttttagatgcatgctttctaagaatgagttaatacagatggaattatgaattttagaattggaaagaaacttaaaaattatctaattcaatatcgtaatttagctttcagccctccctgaccctctagcacaatgttatacatataaaggatgctcagcagctggttttggtttagatatttatcaaattacgtcatagtaatacctgcactcggatttaagaacttaagtgccatgaattgtatcgattcattgatgagatcagtagtattttaatactactaatacagtagccccacctctccctatctcccagtgctgcccagagatgaccacttttcttctacgtgtgtcttctggtaattaggtttgcttgtttcgtctcctggttagagtgtgtgcttgtggggtgcatttgtcttccaaccttttaaggttagtgtgtatcctatgaagtcaaacataaatgagcttggtccctagaaattttatctgcacagagaaccttctataaaagaaaaaaagatggtcctggaaaccgcagacatagatgctaaattctattaaatatactgaaaaatactggaaaaaagtcaacctcaaatcaacaaacaacttttgtataataatttggttttgaaaactaatacatgaagccgacagttacatagagaatatatttttccattaaactgcattataacctcggcgttacattcctaaagcttccagtggaaaagccttttgaaaatcccagttacccataatattcagtgagaggcattctactgacaagtggacggttaatccatgtgatgtgtttagaagcagacacgttaaagtactccgcaaataagttattcctattattttggatcttctcagaaactcctgggacttgactaaataacagcgattgactatatcagatgtcaaccatagcttaatagctaaaagagctactttcaaatggtctcccaaacagaacttagttcactaatgccctcataaaattaaagaacatctttttatcattattttattaaaggctttcatccaaatgggatgatatacgggcgatcttttttttttttttttttttttttttttttttttttttttgagacggagtttcactcttgttgcccaggctggagtgcaatggcgtggtctccgctcatcgcaacctcctacccggttcaagcaattctcctgcctcagcctccccagtagctgggattacaggcatatgccaccaccatgcccagctacttttgtatttttagtagagacgaggtttctccatgttggtcaggctggtcttgaactcccaacctcaggtgatccgcccgcctcagctgttcaaagtgctgggattacaggcatgagccaccgcagccggccatgggtgatctttcttttagacaagggaagaatataggtaatttagcctagattttttaattcctgaagtggaactccataaggatctagatgcagttcaggcttaactaaattgtgacttgatttttttttttttaagcaaaggacatgcagctatttttagtccctttaaaaaatggactttatataaagtagcaatgtgtaggaaaaggttgagctgttccaaattataaaccttgtcactggttatatgtaagtgaatggagccaattttatacaataggttcaacatgtggtacatagataactattattaaacttttggcactagcatgttaaggaatcgagcctgaataattaccagtaggtgggttaatggcttttgctatcttgcgaaaaaggaaaattcttatggctaagacwcgttggcaaaaaatgatgagtttttaggttttgtagttggttaagataattttcttaggaacatgattttatgttccagatgggtcagtcagtttgtcctttctgtgtgatgtaacctatacttctaagatagttcagaaatcctgatccttcttggtaggagaagtctacttttagacttcggcaagaactttttagaacttttttagggaaaagatatatggggtttttctttgtctttwaaaatccttttcctaaaaattgttaactgtgttttagcgcataaaatgggtatgcgctaaaattgtgaaagcaaaaattaaggtagctttcatacatttatctttgaggtcacttgtttaggcagcagatcactagtagtataacagttggatgcaaggaaaaatgtttctatttctagttccagttaagttcagatacttgataattcatttgatacaaattttaactaacaatgccacattaactttcacataagtaagacagttttataaaatgattgactgatactttatttaaattgtcattcttagattactctttgcagaattttggttaattgtgaagctgaaatatcctgactctacctcaaagttaatgttttaggtaactgaacaggtattcttcccattactagtattgaagtcagaatacagaaacaaattaattatggaactggctctaaggctacaagctttatagagtaaaccaaatgtcagcaatttagttttagtgaaattaaaaattaatattacttattaatttgaattktgtttttatttaaaaatttatttctattttaaagttaagggctataagcataagcatttacagtagtttggtatttgtaggtctttaagtaacatgacagaacttatttaagtgattaatggggtttgctgacattttttrttccactaaagagaacctatagagtagttttagaactgctggtctgtgccttgttgagtagtgcatacttctcaccacgcttattttggatcagctgggcatggtggctcatgcctgtaatcccagcaatttgggaggccaaaatgggccgttcacttgaacccagaagtttgagaccagcctggccaacatggcgaaaccccatctctaccaaaaaaattttttttaaattagtcggccgagcgtggtggctcayacctgtaatcccagtactttgggaggccgaggcgggcagatcacgaggtcaggagatcaagaccatcctggctaacacccgtctctactaaaaatacaaaaaattagccaggcatggtggcgggcacatgtagtcccagctactcgggaggctgaggcaggagaatcggttgaacccaggaggcgaaggttgcagtgagccaagattgtgccactgcactccagcctgggcgacagagcgagactccgtctcaaaaaaaaaaaaaattagtaggatatggctgcatgcacctgtagtcgcatctactctggaggctgaggtgggagaatcacctgagcccaggagatccaggctgcagtgagctgtgattgtgccaccgcagtccagcttgggcaacagagcaagactctggcttaaaaaataagttatcacaggccgggcgcggttggtcacacctgtaatcccagcactatggaaggccaaggtgggtgtatcatctgaggtcaggagttcaagaccaacctggccaacatggtgaaaccccgtctctactaaaaataaaaaaaaatagccaggtgtggtggtaggcgcctctaatcccagctactcgggaagctgaggcaggagaattgctggaatctgggggatggaggttgcagtgagccgagatcacaccattgcattccagactgggcgacagagtaggactccatctcaaaaaaaataaataaataagttatcatggtttaaagaatgatttaaatctttaatttttgcaaagcatcagtggacagatgggtgtaatagaggtagagagaacgcaaggatttagttccctactgactagtgacaaagagtccctcattgaccaaactctcctcagattcctytgaaagaactttctgctccggtaagcctcgacttttttacttcatgtttatgcctgcattgttcagttttagtaagaatcctgctgagttgctttaactataacccctgtcatcccccctcagtatctgatcacccgccatagctaattgggttccttctcctccaccatccctcaggtgatgtctgatcaccctcgcctgccttcaacaagaatcctgttaggtcattttagccagaatcttctgtttctcctgatggctcctcttagtaattttccatccactgactctatattcccatctttgggtctaagtttccacttgccaatcgtgtattcaaagttaagcctagttctatactcagatctcttttcccctattgcaataatcttgaataaaatttgtttttaccactttaagtattgtccatctctggttttccctgacacaaccatgtgacttcttacattgtttactgtttgcttatcttaactcattcttcaaagctaagatgctgattcaaacacttatttctacttgcgtgagaaatataaaagtctgaggtctagtgtggtactaattcactataattgaaagaagtgcttgacctataaatgaagcttatgcttaccttagaattgaaacatatggctgggcgtggtggctcacacttataatcccagcactttgggaagccaaagcaggcagatcacttgagcccagaagttcaaaaccagcctgggcaatatggtgaaacatcatctctaccaaaaaagtcagaataattagccaggcatggtggtgtgagcctgtagtccccagctacctgggaggcgaaggttgcagtgagctgagattgtgccacagcactccagcttgtgtgacagagcgagaccctgtctaaaaaaaaaaaaaaaaaaaaaaaaaaaaaaaagatttttattttcaaaaggtggtggttttattattttttgaagtacttacctaatttatttttgttcttttgatgctgttttaattagcaaatacgtggtttcttgtgtttgggcattttgtacttctttgcctcagtgaattgtacatttaatttataacattgaagcattttatgttggtgcattatttgaagaactggtgtgtgacaactttatggcatgcctcttttctaactaatcttttttcaccccccttgcaaagatttaaaaattactcatttgaatgtgggtggttatgtagatctgtaagtatatttatcattgagtatatagtaagatttaacacattatttctgacaaccagaaagctaaaaaatgtatcggttttgctgaaaatctttaatagtcaagtttctgtgttaaaaattttagtagtttttgttgatataaggatatataaatacgcaaatggaaaaacttaatgtacatagtgtctctttcaccattattgacttttttttttttttttggtggtggtaataaatggaaatagtttagaaaaatatgagccgatgactacccaaaaataaaatttggtcatcccccagtctctaccaactgccaagtttatccctactgttaacaagacaatcagaatacatcaatatataggatttctgttatattttaggcctttattgagactatctagtataatgaaatacttcaaggtgcttaaatctgtggtacctagaatgatgagaaataaaaggtaacactattagtgtaaaggttatgctgcccatcttctgtcatcttgggtttattgatagattatgtgaataatgatgggctactcttcctcgacctctgtagcaggtgtcatgtattttttagatgaaaggtcatggaaaacccatcccctaccacataccagactcgttgcatgtgaaatattatttttaatatttaagaagcttaatctgaaattaaaactcagtatagtaactacacttgctttattttgccacctttccagtgtctagcatggatttttatgcttatttggatgcctcttctctgttagtccctgtaccagacccaaaagttacagtacagtggtcaccagcatcttccccagttgatgtacaggggaaataacaggttcccttataataactgactcttattctatactaagcgtggagccacaaagtgccagatttttttctcacttgatccacacaacagccccatgaggtgtaaatactgtttttgtctttttttgttttggggcggagaggaggttggttctgttctctctctcttttttttttttttttttttggttttgtttttttggttttgtttttgttttcaggtgaggaaatcgagatgtgaaatattaagtgtcttgactaaggtctcttagattctggattcacactctagtctctgtgtcatcctgcctctctgaaatagtgtgtaatggtgttagatcaaaaccctccacattatagctccatttagaatacagtttgttagctagacactgctcccaaggtattacgagtcaaaactaaagggaaaaaagtttagtttaaaaaatagaactgggccaggcgtggtgactcatgcctgtaatcccagcactttaggacactgaggtaggaggatcacttgagcccaagagttcaagaccaacctggtcaacatggcaaaaccctgtcrctacaaaaaaaaaaattaaataaataaataaaaattaaaaataaataaaaagtggatctgattataaagtaataaaaaatatttttatgtttgagtgataaattcctgctaaaaattccaaaggaggaatttatttttaaccattagtaacactaatgagtttgtctcttccactataaagcagtagctgccttctaaggaatcaccctattgttaaaaagcatgctctaaaaataagggggagggacagggagttggaacctagagagtttcatgttttcagtgacagttattcttcctgaataatctcaataagaaaaattttgatagttaaaaacatgaaacctaacaccactagaggcaaatctaataatcaattgcatctacttttgcttaggctttgggcttttttttcttatcagcactgccattaacacaacacaatacgttttgcacctttgtatcactctcttgagaagtaaggcacaaagtcactcaaaaaagcagctgtgtggtgtatgccactgatgttgaaaataaaaccacagactcagaatttaaaataagaatttatcttttactaagattgtggatgcaggaaagaatagaaaggatttggctggataactaatactgttccttaacacatctaattgcaggcgctttgttagacacttgtaccaactaaagtcctttcctagaattgctccatcaacagcaagggagaagagatcttggaacatttaggtatgggtgtccttttagattagctttttgtagagtgtgctaatgtactgtcagttctgctatgtgacatacgcattcctaaaactaaccgtcctatgcaaaattgtgcaataaaaaccacagtgtttatggagaaaatgagattaatggcataacactcaaaaacttgatgtggagaaagggaaacccctcatacactattggtgggaaygtaaattagtatagcctctatggaaaacggtatggcggctcatgagaaattaaaaatagaactaccatatgatccagtaatcccattatggggtaattattcaaaggaaatgaaatgattatgtcaaagagagatacatatttgcactccaatatttattgcagcaccattcaccatagccragatatggattcaacctaagtttccttcaacagatgaatggataaagtgtgggatatatacactctggaatactattcagccataaaaagtgaaatcttgtcatttgtggcaacatagatgaacctgcagagcattatgttgagtggaataagctggacacagagaaatactggatgatctcatgtgctaaagatgttgatcacatagatgtagagagaatagttggtggggggcagagggggatgagggagagattggtcagtctgttcaaaattacagataggaagaagagtaagttctggtgttctcttgcacagtagggtaactatggttaacaatattgcatatttcaaaacagctggaagagagaatttgggaagttctcaccacaaggaagtgataaatgtttgaggtgatagatatgccaaatgctctgatttgatttttacacgatgtgtacatatatggagacatcacactgtacctcataaatatgtacaattatgtgtcaatttaaaaaaaaaaacttcattaatggcatactttttgaaaagatgagacggagtctcactcttgttgccaaggctggagtgcagtggtgcaatctcggcttactgcaacctctgcctcccaggttcaagcgattctcctgcgtcagcctcctgggtagctgggtaaattacaggcgcccaccaccacgcccagytaatttttgtatttttagtagagacagggtttcatcatgttggccagcctggtcttgaactcctcacctcaggtgatccacccgcctcagcctcccaaagtgcagggactacaggcatgagccaccaagcccggccagtaacctaacttcttaaaggtaacagttttatactcgttgaatggttaagaaatacataaatactacaataaatatagcattttaccttgaaaaaaatgtgcagtttgcttgtggaagtgggtatcaaaagaaaggcagtttgtaagttattttgaagtgatggaaggaacagtgtctgaaatcagagggaaagttgtaacaccagatgtggatgggtatggctcataacatgagttacaagtagatgtttaaggtgtgtgcattttgtatattcctgcatggccgagtgcacccaagtgttgttgtctgcattgaccgagtgttctcactgatgaaatctggcataggcaaaagcaaaattctcattatactcaaattgttccctaatgtgtcaacgatgttgaaacaaattcacattttcaaaacaagctttatagcaaaactgtactcttgaaagtgacaacagggtttgctagtgaatggataaaacatgaatcttatctgtttgcttacaacttatgtgtgggggtaaggaaaataatgaattagaaaattactggtttgagaaactaagtggaagtgacaccattaatctggaataaattgccaacatggactgagagtacacatgacccactctttggaactgagatgggctcatcttcccatatggcacttggccaaatatagagtagacaccaaagaggagtgaagctagcccctttagcaaagaagaaggsaagtccattgggcaggcagccagtagtgtttcctaagcttaactatatcgagttaattgaagagaagttccaggcttttgagtttagaaaaagcccaacaggttgttttacccaataatcctctgattataatttccaccaatctgcctcccccaggctgcctcattttccgttggacctcatcaagacttctagtctttttatccatctccacattctctcccagtcttttcagcctcttcctgacctcatgtggccccatgctccattcctgaaactacgctctgcacctttatccactgttccccgcccctttgtttctcttgccccacaaacaccctacaaactcccctgtcccaaagactcctgattccatcatctaacaccaggctagagtatcctgtgtgttcatggcatgacaactgattcctattcctcagctgggcccactagtgtatattctactttataatgaaaatagaggtttatgggctgtgcctgtgttttcgttgtttcactgacctcttcaggatctcattcctctttatctcttagtttctaagtataattggaaaggcaaaatttggaaagcactgagttccattgcttagtattctaccacccttctgttattattaaaaacagtacatcaccaacatctaaaccaattctagtgagttctgttgcttaaataaaacaaaaatctttacttagaaacttgaggatcaatgaagcatgagataattcagaagaatatttagttagtaacacattctctttgggaagctagcagctcagttagtgracgagctaactattctgccagaatctggtttggaaaatagtatggagagaaatatgtctgtgaggaaaaggccatttctaatctccatttaattttaattctgtcttagatcagttgttatatataaaatgcttggagctagaggagtgccttaggactatttgtttattttcaagatgtttcgtttccattttgaatgttactgcccaaagagactggacattaaagcatgtgaactcatacacaacaaagtgggagaaacaatggtgtttatatgttaattccatgaagccctatatttaactctattccctctggccatataccaggtggaaaaaagcaaggactgtgctattaaaaatatcaaatcagatagttccagctggggtttcttaatcatttaaaaggcaaaatatgaggtcacttttaatatcttaagtagataacgatcttagcatttactttagatattaaatctgaagtgcttatcttttgccttactggctagacaatactactagcagtttctagctttggagtattttccttaaaagaaacattggaatttaatacggagccaactattttgcctcaaattgtctgtcttaggaatatccaattcatcaatagagtaatctaaaaagttgattcactaattggatttaagtgccacaggactcttcacacattattttaatcaatttgttggaaagatcaattttctcatggatgaatgcatataaaaatgaagcaattgaatgagttacataggaaggttggcacatctaattccctagaggttctaggaacaggttcttaattatatatctgaaatggtttgaggtttttaaatgaaatttgtctagaagcaggaagatgcaatacccatctatccaggcctgtatttctggatccccatcttatctaatatttaatagttgatcctgaagttgagatattatccctttattcttttaaaaaaaatttttttgtatgtgtgccattttaaagtaattaacagagtagtttgtgttagttttggttaagtgttataaagccagtttttttttaaaggaagtcctggaggcctttttgtattgactgttagagaggacagtgagtgtaaacacaagtttttaaagtttaaagttacagtgcccactataaaggactacaattaatgtgaaaagtagttttaaagttaaaatttatatatcgctgtttgtgcttatataatacttcccactctccccaaacatagaggtattctgattctgaaaataagccttttttagtaccattatgtgtatacatatatattttattttatttttctttatattagtcattgtggttaaatgatttattggtagctgatgagtcacaagtatgtttctcattctctaatgagtcacctagctacctacaagtttgtttattttctttcctttctagatctttcacctaaaataggtgttttactagttggtaggttaaaatttcagtttgctacattaactttttttttttttttggagacgggagacggagtctcgctttgtcacctaggctggaatgcagtggcacaatcttgactctctgcagcctctgcctcccaggttaaagcgattctctacctcagcctcccgagtatctaggactacaggcacacgctaccacgcccagctaaattttttttgtgtacttttagtggagacggggtttcaccatgttggccaggctgctctcaaactcctgacctcaagtgatccacccgccctggcctcccaaagtgctgagattacaggcatgagccactgtacccagcctacattaactattagatctggaaaataccaaaataatactcagaagaagtctcattgatttttacaaacttgtatttagcacgtgctctggtccaggtactctgctgggcttgagtatgcaaagatttatgtgtgtcatatatatcttaggagaagcttaattttgggagagggcaagggagataaacaactgcatgcagaggcagggtatacaggtgctgtgataggagtgtatattgtctgtagttgaggcccaaagagaggtgtgcatgtggataccccttgagcatccatatggataagttggtgaatgtaggcaaggccattatactgttgtgtattgcaactccttgaacagttgcacctacattttatacctctttgttggaacagggtatttatctgttagaggaaaaacagcttctattttcagtcctgtccactgcaacatctgtattgaaaatttggataatgctaaaggtgtgctaagaaaaaaaacgggtctaaaatctgctgtcagaaattttcagatcgtttgtgggattaattctcctgggctaaatataactttgtataaaacaatatgaaattattatttaaagattttgctgaatttctactaaggttggcaacaacagcaaaacatcaagatacatcagtgttactggggaaggtagtatgattcctggacatttgggaaactattactaaagggcctattattttcagttgttgttgttttttkgtttttttttttttcacagaaactataaagcaatctagcagctcatgagcttctaagaatgaaaatgtattatttcatagtgagctgatgatgcattctgagatatttaaatttagttctaatttgtcagtctgtaacagaactgtctagtgcaataatcattaaatgatcttattagctatgtgatggtagtctaattacttaaccttgtagagtctcagttttctcatctgtaaaatgttgataatacctaccgtgtaggcctttgtgaagcgcaaatgagatagtgtctacctaaagcacttcacacagaacctggaacataaaagggaattgctaaagaaataatagaaataatactttagggatttagttgttaaatctcttttcttttttctcttttttctttctttcttttttttttttttctgagatggagtctcgttctgtcacccaggcaggagtgcagtggcacgatctctgctcactgtaacctctgtctcctgggttcaagcaattcttctgcctcagcctccagagtagctggggctacagggccacgccaccacacccagctaatttttttgtatttttagtagagactgggtttcaccatgttggccacgctggtcttaaactcctgacctcaggtcatccacccaccccgacctcccagaagtgctgggattacaggcatgagccaccgtgcctgggctaaaatcactttcatttgagctataaaaataaaagtgtgtttgccaggcatggtggctcacgcctgtaatcccaccactttgggaagcagaggcaggtggatcacttgagcccaggagttcgagaccatcctgggcaacatgatgaaaccctgtctctacataaaatacagaaattagccgggcgtggtggtgcctgcctgtagtcccagctactcaggagtctgaagtgggagggtcacttgaacctaggagatgagtttgcagtgagttgatcccagtgattcttctctatatgctcaggaggactcgtcagagtcaaaacctgatactgggacccagcagcaagagataaactgctttttcccccgatttatgtctccatttatttgcaagatggtgacctctttgactggagttgtgtgctgttaaatattttttcacgtgtctcctatacagaaattataccttcacccttgattttcagatcatctacggtagccatttctcagggtttatgattcttgttctctaccccagtgctctccaaagtgtgatatgctcaagattacccattgagggaaagaaaataattcaacttccttcattccgcctaccctttcttccctgcttttttcttttatctaaaaggatgagaatgaatttgagtttttccaatagttaatttatacataaacactggacccataacttggattgcttctcagaaggttacatatcacctatagcatgtgaggtttctgaaggaagattgtgggattccagtaatgaaaagaagctagcagtggtaccctcattctcctctctcctcccttctttcttcccctcccctcctttcctctcctgtagatattatgccatcttcatatacaatgtcagttaaaaccatataatcagactctttctacagtcagtagaattttattcttctactgcagtaatgtacgcaagtattcctgtctctcttgttttgactctattttatatatacacacataaaaccctcggatagtctgaccctttttcacaaatggaacctttttgattttaatgttttttcttctgaattcactcatgtctacagtaagacaaaaatggatgtagatacagatgtagctgtatagagataatagggctaaattgtccaaaatcatggaatagttttactaatgtctaaataggttatgatttttaacagctgcatataataaggggaaatactgagattggaagggttaaaaaaaattaactgttctctatgtctgattaatcctgccttctttcccgttgattcagtagaacaatttgtaattgcagaaatttataatagctttggccctagcttaagaaatagtttgtggtttcagaagttaatttgtaagttgtttcgtcctggaaacaatgttctaagtggtagttgttttctagactagctgatctaatattttagcactcagtactacgaaattaaagtactaaaggtagatatagttccatgtttcaggtcctgggttaaaagagtcatctggtacttttgaatgagaaagaagagggaatttttttttgctttaattggacctacagccagccctgggcagagtatctttgactacattccaccttctttctagaaggatactagcatgacgctcagtccttaaaagcagatgtgtttgggccgggcgcgatggctcatgcctgtaatcccagcagtttgggaggccaagacgggtggatcacctgaggtcaggagttcaagaccaccctggccaacatggtgaaaccctgtctctgctaaacatacaaaaattagccaggcatggtggcacatgcctgtaatcccagctactcaggaggctgagacaggagaatcacttgaacccgggaggcggaggttgcaatgagtcaagatggagccactgcactccagcctaggtgacagagacaagaccctgtctcaaaaaaaaaaaagtagatgtgtttgacttgagttggcctgaagaagactgtctgataatggaaggtgcagagggccagcaaatgccttctaataggagtcaaagtttgtgagacgaggggaccaaggggtcagggatatagaagaaaggtagcagagtggacctctacttgggacaggtcaggttgcttgatgaagcagtacattgatcgatacagaggagaaaaccttccttgtgaagatgtgtgagataagcaatagaattctcaccaggcctgaatatacactcagttatcacatttactggtaggtggcagtcaaattgaagatagattcagttcagtgacactagattgcaagtattagaaaactttgtaacagtccactggagcctcttgatcccttcaagcctcagaagagccttatcttagttcaccaactacttcttttgccataataaattctgagtttcttcagtagtcaagattttagctaggtattaggtgatagccccagtgcaggagacttacgagagtacaagagatatgcatgctgttgattttttttttttaagttagttggtaacagacataaagatwtctaggcagtgtagccaagtgacataaacaattttctttcttaactactcttcacctattatcctcattttgatcctttttcattgaaatggattctggtgttctcttgtttaaagtaagtactgtctggtttctggaatgtctaattgcaccacaactactaaagacccaaatcctcatcagaatgaatagaatttttccatgaaaattaaatcttatccttttcatcaactatattgtgatatactttgtcagtacaagaatatacacaaaagtaaaactggtacattttgtatgggaatcaccattttggagtatacattttcttccttggttatgtactagtgattaaaaaaataatcattgtgtttaataagctactttataaattttgtattttagaatttcagtgtctggtgttcagaattcaagttattataaaaataagctgtccaggagatgcatttattttacactcatcatatattaaacttcatataggcacccttttaaatgggagtacacaatccaataatcataaatctgatgacggagtatactcagaagctaaaggtagtgaggatttaattgcaaaacagcacgctaatgtcctcttattaccttaaaatcttttcagttgaccgtcttctattatttaattccatcacataccagtaattgcatttattgaagccagtatttctcattataggaaatgctgatcttagtgattctcaaaaatagggagggaaatgttctttaataaataattaaaagactttttactacttttcccaattcggtactggttttattaccttttatgtccagagtattttataagtggtaactaaattatggcatctaaaaaatcatctcttcaaggaatctcacaaggtatgctacgtaatagcttattctaagtaggttaaatagactggctttatctcaagtggcttactgtattaaaaaagagtttaacatattcagctttactgctgaaacaccagaggagttctgacacctctgatgagatgattcaagttgggaattttttctcttgacagcatcaacaaagagagcattgtggatgtagaaggtgttgtgagaaaagtgaatcasaaaattggaagctgtacacagcaagacgttgagttacatgttcagaaggtaagttttttcaaaatataaaatcgcatatagaaatagatttgggttctaatagttttcatgtcaaatttatatgttcttactaattaatgtaaaatactgaggtttataaattagttactgaatcaattagcttttgttatataacaaatcaccccagtacttagtgacttgaaacaacaaacrtttatttgcttacaattctgtgatgcacccaactgagatggctcatctgctccatgcaacattggctgggctcactgataaatctggcacatctctttctgtggcttcctctcatccagcaggctagcccagatatgttgatattcaggtaccaggagggttcccaaaggcaagagtgcgaaaccctaagaacagacacttttcaagcttctacttgtgtcacatctgctaaatattccactcgtcaaagtcacacagcaaaacttagatttaaggggtagagaaatagattctagcccttgatgggaggaaaagcaacatgattgcaggggaatatacatgcaggagcaagaggaagtattgcagccatttttgcaaacagtctaccacagccacatagggaaaaatacaaaacacatctgaaaaactactcaccaatataagtgaataataatggacctatcttgctataagttttttgatgatgtacttttattttattttatttttcagtttccatttttacttttcctttatttttatactttaagttctaggatacatgtgcacaacgtgcaggtttgctacatatgtatacatgcgccatgttggtgtgctgcacccattaactcstcatttacattaggtatatctcctgatgctgtccctcccccctccccccaccccactacaggccctgatgtgtgatgttccccttcctgtgtccaagtgatctcwttgttcaattcccacctatgagtgagaacatgcggtgtttggttttctgcccttgtgatagtttgctgagaatgatggtttccagcttcatccacgtccctacaaaggacatgaactcatccttttttatggctgcatagtattccatggtgtatatgtgccacattttcttaatccagtctatcattgatggacatttgggttggtatcaagtttttgctattgcgaatagtgccgcaataaacgtacgtgtgcatgtgtctttatagcagcatgatttataatcctttgggtatatacccagtaatgggatggctgggtcaaatggtatttctagttctagatccctgaggaatcaccacactgacttccacaatggttgaactcgtttacagtcccaccaacagtgtaaaagtgttcctatttctccacatcctctccagcacctgttgtttcctgactttttaatgatcgccattctaactggtgtgagatggtatctcattggttttgatttgcatttctctgatggccagtgatgatgagcattttttcatgtgtcttttggctgcataaatgtcttcttttgagaagtgtctgttcatatcctttgcccactttttgatggggttgtttttttcttgtaaatttgttggagttcattgtagattctgaatattagccctttgtcagatgagtaggttgtgaaaattttctcccattttgtaggttgcctgttcactctgatggtagtttcttttgctgtgcagaagctctttagtttaattagatcccatttgtcaattttggcttttgttgccattgcttttggtgttttagacatgaagtccttgcccatgcctatgtcctgaatggtaatgcctaggttttcttctagggtttttatggttttaggtctaacgtttaagtctttaatccatcttgaattaattcttgtataaggtgtaaggaagggatccagtttcagctttctacatatggctagccagttttcccagcaccatttattaaatagggaatcctttccccattgcttgtttttctcaggtttgtcaaatatgagatagttgtagatatgcggtgttatttctgagggctctgttctgttccattgatctatatctgttttggtaccagtaccatgctgttttggttactgtagccttgtagtatagtttgaagtcaggtagcgtggtgcctccagttttgttcttttggcttaggattgtcttcgcaatgcaggctcttttttggttccatatgaactttaaagtagttttttccaattctgtgaagaaagtccttggtagcttgatggggatggcattgaatctataaattaccttgggcagtatggccattttcacaatattgattcttcctatccatgtgcatgcaatgttcttccatttgtttgtgtcctcttttattttgttgagcagtggtttgtagttctccttgaagaggtccttcacatcccttgtaagttggattcctaggtattttattctctttgaagcaattgtgaatgggagttcactcatgatttggctctctgtttgtttgttattggtgtataggaaggcttgtgatttttgtacattgattttgtatcctgagactttgctgaagttgcgtatcagcttaaggaggttttggcctgagacgatggggttttctaaatatacaatcatgtcatctgcaaacagggacaatttgacttgctcttttcctaattgaataccctttattcctttctcgtgcctgattgccctggccagaacttccaacactgtgttgaataggagtggtgagagaggacatacctgtcttgtgccagttttcaaagggaatacttccagtttttgaccattcagtatgatattggctgtgggtttgtcataratagctcttattattttgagatacgtctcatctatacctagtttattaagagtttttagcatgaagggctgttgaattttgtcaaaggccttctctgcatctattgagataatcatgtggtttttgtctttggttctgtttatatgctggattacgtttattgatttgcatatgttaaaccagccttacatcccagggataaagccagcttaatggtagtggataagctttttgatgtgctgctggatttgttttgccagtattttattgaggatttttgcatcgatgttcatcagggatattggtctaaaattctcttttttttgttatgtctctgccaggctttggtatcaggatgatgctgacctcataaaatgagttagggaggattccctctttttctgttgattggaatagtttcagaaggaatggtaccagctcctctttgtatctctggtagaattcagttgtgaatccgtctggtcctggactttttttggttggtaggctattgattattgcctcaatttcagagcctgttattggtctattgagggattcagcttcttcctggtttagtcttgggagggtgtatgtgtccaggaatttatccatttcttctagactttctagtttatttgcatagaggtgtttatagtattctctgatggtagtttgtatttctgtgggatcggtggtgatatcccctttatcattttttattgcrtctatttgattcttctctcttttcttctttattagtcttgctagcggtctrtcagttttgttgatcttttcaaaaaaccagctcctggattcattgattttttgaagggtttttgtgtctctgtctccttcaattctgctctgatcttagttaytcttgccttctgctagcttttgaatgtgtttgctcttgcttctctagttcttttaattgtgatgttagggtgtcaattttagatctttcttgctttctcttgtgggcatttagtgctataaatttccctctacacactgctttaaatgtgtcccagagattctggtatgttgtgtctttgttctcattgatttcaaagaacatctttatttccgccttcatttcattatgtactcagtagtcattcaggagcaggttgttcagtttccatgtagttgagtagttttgagtgagtttcttaatcctgagttctagtttgattgcagtgtggtctgagagacagtttgttataatttctgttcttttacatttgctgaggagtgttttgcttccagctatgtggtcaattttggaataagtgcaatgtggtgctgagaagaatgtatattctgttgatttggggtggagagttctgcagatgtctattaggtccgcttggtgcagagctgagttcaattcctggatatccttgttatctttctgtctcattgatctgcctaatgttgacagtggggtgttaaagtctcccattattattgtgaggaagtctaagtctctgtaggtctctaaggacttgctttatgaatctgggtgctcctgtattgggtgcatatatatttaggatagttagctcttcttgttgaattgatccctttaccattatttaatggccttctttgtctcttttgatctttgttggcttaaagtctgttttatcagagactagggttgcaacccctgttttttttggttttccatttgcttggtagatcttcctccatccctttattttgagccaatgtgtgtctctgcatgtgagatgggtctgctgaatacagcacactgatgggtcttgactctttatccaatttgccagtctgtgtcttttaattggagcaattagcccatttacatttaaggttaatattgttatgtgtgaatttgatcctgtcatgacgttagctggttattttgcttgttagttgatgcagaaaagctgaaaattctaaaaatcagagygcctcttatcctccaaaggaacgcagctcctcgccagcaacgcaacaaagctggacagagaatgactttgacaaattgagagaagaaggcttcagacggtagataataaacttctctgagctaaaggwggatgtttgaatacatcgcaaagaagctaaaaaccttgaaaaaaagattagatgaatggctaactagaataaacagcatagagaagaacttaaatgacctgatggagctgaaaaccatggcacaggaactacgtgatgcatgcacaagcttcagtagccaatttgatcaagtggaagaaagagtatctgtgattgaagatcaaatgaatgaaatgaagcaagaagagaagtttagagaaaaaagagtaaaaagaaacgaacaaagcctccargaaacatgggactatgtgaaaagaccaaatctacgtctgattggtgtacctgaaagtgacagggagaatggaaccaagttggaaaacactcttcaggatattatccaggagaatttccccaacctagcaaggcaggccaacattcaaattcaggaaatacagagaacgccacaaagatactcgagaagagcaactccaagacacacaattgtcagattcaccaaagttgaaatgaaggaaaaaatgttaagggcagccagagagaaagctcgggttacccgcaaagggaagcccatcagactaacagctgatatctcggcagaaactttacaagccagaagagagtgggggccaatattcatcattcttaaagaaaagaaatttcaacccagagtttcatatccagccaaactaagcttcataagtgaaggagaaataaaatcctttacagacaagcaaatgctgagagattttgtcaccaccaggcctgccttataagagctcctgaaggaggcactaaacatggaaaggaacaaccagtaccagccactgcaaaaacatgccaaattgtaaagaccgtcgatgctaggaagaaactgcatcaactaacgatgatgtacttttaaagaatgattaattaactaattcttagtcttataataattacttttctgatattttttacaacatagagaagtcaaaataaatagtaccttattggtcttatattccaacagtagcttcctttttttttaaagaagacttatctctgatctgtttttttctcaggattaaaaactgaaagagctcattatcattgacttaaaataccataagtgtcacttgaggtcaggagttcaaaaccagcctgatcaacatggcgaaaccttgtttctactaaaaatacaaaaattagccaggcgtggtggcaggtgcatgcaatcccagctactcaggaggctgaggcaagagaattgcttgaacccaggagacagaggttgcagtgagccaagatcgcaccactgcactccaacctgcgtgactaagtgagaccccatctcaacaacaaaaaaaaaccataagtgaattcacacatatttagtactattgaaataaccctgccagtttgaacctacagtgctcagatttaggtctagattgtatctacaatatacatcactaaatttctcttaaggagtagtctttaagacagcatggcctcttcccgccctgatccgtgtgcacatgcatgaccatatgtaagagtcaggcagaccaacaggcagacagattcagagataggcctatatgtacttactgatttaagagtaacattgtatttagctggaatctgttttcttggaactcttcaagacttacaaaaccttgtaatttttactgacctaatttgacaaatgactttgttgtctttgtgtaagtctcatcttgaaacaaccccaccaggaagtttgtaacctagtaaagacaaactgaccaaagagtaagaataaagataaatgaataaacccatttatgttgaccaagaaagataactcccacatcttccaagtaacacatctttttcagtacttgaataaagaaaatttggccagatgtggtggctcacacctgcaatcccagtgctttgggaggccagggtgggaggatcacttgaccccaggagttggaggttacagtgagctgtgatcacaccactgcgctctagcctgggtgacagagcaagaccctgtctcaaaactaaaaaaaaaaagtgtatgtgtgtgtatatatatatttctgtttttttactagaagcaaatgtagttttaagatattcttattgtctagatgtgtgcaatgcaacattaataaatattagtaataaattttaagccagaagagcttacagaatttgccataataaaaataaagtatttcacaaagcatgaagtattacctactaagtagaatcttatataagtagtgactttgctttatcacttatttatttattcagccagcagttactgttgataggtgctttgtgccaagcactatgtgaagactctggggtcagagtactcatggtctagtaaagaggatgatgaattcccactagttataaaagtagaagtagcagctcttcagctctccagtttggattggagatgaagtttctgttaacttgtcaaagggaatcctagaatttgggtttagggagtggtgacaaatagttctattttataataaggaatactagagtatcctacactatttcttggagtatctaagctgaatgccaatattgatctgccaactagaagagtataattccctttcctgaagtaactaaataaggtatttttcccgtttgtgctttagcaggttttccagacatagtttgggttaactaatatgataaaatggtttttaaaggtagccagaaaaacaaaaagcaaaaaactctagttcagtctttatgacccagttgctttttatcactaaaatgtgaaattagtgtgagtgaatattgatggaatttttatttatttatttatttattttttcgagacagagtctcgctgtgtcacccaggctggagtgcagcggcgggatctcggctcattgcaacctccacctcccaggttcacgccattctcctgcctcagcctcccgagtagctgggattgtaggcacctgccaccacgccccactaattttttgtatttttttttagtagagatggggtttcactctgttagccaagatggtctcgatctcctgacctcgtgatccgcctgcctcggcctcccaaagtgctgggattacaggcgtgagccaccgcgcctggcctattgagggattttgacaacataaaggaacatcctctagggcatttcctaaccaggagactggcaggaaatgagatgtttgtaacatgtttaatgagagagagcaatgaaggggtacttgaaaggagaaagaatgagaaaagaagtgcagcagagctggactgaatttggtcctagtggtggcagtggcagtggcgctggccaaatgctgttaaaaataacaagatggccgggcgtggtggctcatgcctgtaatcccagaactttgggaggccattgcaggcagatcacgaggtcacgagtttgagaccagcctggccaacatagcgaaatgctgtctctacgaaaaatacaaaaattagctggtgtggcacgtgcctgtagtcccagctactcaggaggctgaggtgggagaatcgcttgaacccgggagacagaggttgcagtgagccaagaccacrccattgcactccagcctgggtgacagagtgggactccgtctcaaaaaaaaaaaaaaaaatgatagcaagtcatatgttaattgctccttcacatgagtaaagtgttttcacatttattattctgtttgattcttatagcaggctttattttaattgaagctctgagattaagtgatttccctaacaatagcttttttgtgtttatgtttgtttttgtttctgtttttgtttttttgagacagggtctcactgtcacccaggctggagtgcagtggtgcgatcttggctcactgcaacctctgcctcccaggttcaagtgatccttgtgcctcagccacccaagtagctgggattttaggcacgtgccaccatgcctggctaatttttgtgttttttgtagagacggggtttcaccatgttgcttagcctggtctcgaactcctgggttcaagtgattaacccaccacagcctccctaagtgctgagattataggtgtcagccacagcaccaacccctaaccatagcttttttgacatagctagaccgtaagccagtgcctacaccccagtcattacttattacattggtaggcatcttaraatttacaaataatttttatatatgttaccttatttgactgttctaacaaccatagaggtaggcaaaaaatattattatccccattttaaacaaatcatcaaggtgaaaaaacctgtatcatcttgtttgatttcagcaagtagtttcaattaaagatgtatgcaaacattgcttcatgcttaagtcaactgtagattgttttttaagaaaaagatgcagattttgtgtgctttctactatttttggtaatctctcacttacagatttatgtgatcagtttggctgaaccccgtctgcccctgcagctggatgatgctgttcggcctgaggcagaaggagaagaggtaaaaattatacttatgaaatattatgcttccgctgtatatttagtttgcaaaacattgaaaacctgatgtactaagggtgtctgtgaattgattttgagctccattgttatttaaacttaytcttaaaatcagcaattctcaaaccttttggtatcgagttgccttttacattattaaaaataattaagaaccctacaagcttttgtttttattggtatatatatcaatatttacagtattgggaattaaaacatttttaaatatttattactttattaaaaattatatatacattgcatacatgtttgcatatgtagtattatgtaaataatgaagctaataacattttatgaaaaaattacagttgtccaaagcaaaaaataattattgttaagagtgacattgtatttagcagtccattgccttaaccactcagctccctcatccttcggatgacattctgtttatataaccacaattctttgtgatttctggcttaatagacaactagattctcatattgcctctgcattcattctattgtgataatacacatcatagaatctttagcagactgctcagtatactcatgaagagtgaaaaacaaaaagtattattatgaaaaagtaagtttgacttcatcaacttctggaaagtctcagggaccttcactgctccccagaccacattttcwgaaccactactctatgtcagcttttatctgttccttcaaccttgggctagcaggttaaatccaggaatcaatgaagaagtgggtggttaatttttcttatatcccaataatgaggcaaggctttgaggggtggaggagggaaagaaccattaatatctgttcattctttgtcttctttccatctctcttttaacgctaacttctctctggccgcactttgtgtttctaccattatctgattttcgggcataatattaacgtacacacatcctactcaattaaaagtaaacatggcttctaaaagtattttttgtgctcttcaaaatattagtaaaatttatttttttcttttctttttytttttttttaggaaggaagagctactgttaaccaggatacaagattagacaacagagtcattgatcttagggtatgcctcatttatttattaagtgaagcaattatgccgcattagagaggggcagggataccatacctgtctcaggcttataaagctaaatggtatttgcctgactgtaagtatgataatacaggaaacaatttccttttctgactgacccttcccctaaaaagaattgcaggcaacaggagcggttaaatactagttaacaggatattgactttctttgttttaaaatgacaaatgaatttgaagccagtaaatgatcttgcttccaggtgatatcttttttagacaagttattcagcaagtagaaacataacctttaatatcactacaaagttatgaaaaaaattacatgcacatttgagatcaaccaggtggagatgagtaattaatgcttcaatcctttgaatttgattggagcaccaaattaaaaatatagaagcagttggctctggtggtttatgcagtagtctcatgggtcttctgtttccctttctggtttggttgcaagtgaaagagagtttagtggtttcatcattgttgtagtaaaaccattgcatctttcttaatattttgaccacatcttccttttttacttaaatattctactcaagctcaaattttttgtcaccttaagagttcttcttggctattctaccatcatgtgagtctacccttattatatactcatgttattcctaattatttgctttttgtcttctaccttttccattttaatttgtatatgaaaagcaagcagtaatccaaagtcctcttgatactacctagaaacctcaggtttttcatgtatgttggccacaggagtgagacatcattctttatttatttgcccttgctagttgttcacacaagttattattggtttgtgcctctagaatttgacctgaggagtttttgggttttgggttgtattgttttgtttaaattcattgccaccattgaaaaatgggttttcacattaaaatctggatggcacttcttaaaaagaggagaatctggaacatgagctagcatgctagataggacatatacaggattcttacactgtcttttgctttgccctgcaccacccagcaaatatcattcatttcattcattcatgttatttggcccttgcaagcgttcacatgcttaactcttactttgactttacattttgggagatgttgtgtacattagtaactttaagtttttaagcaccttcgtttccttctaaactactgtcttggtttggtgcagtgtctcacacctgtaatcccaacactttgggagcctgaggtgggaagaatgcttgagcacacgagtttaaaaccagcctgggcaacatggcaagacccctgtctccttaaaaaatttaaaaattagccaagtatgatggcatgcatctgtggtcccagctactcaggaggctgaagcaggaggattgcttgagcccaggaggttgagtctgcagtgagctatgtttgtaccactgcactccagtctgggcaacagagcaagatcctgtctcaacaaataaaaaataaactactatctaatttagtccccaactagctctttcatagactctcagcaaagtcaagggytaaagaatttggaaataaaaggcaaaattgccattcttcttctataatacaaacgttctaagatatatcctccgtcaggttctagtgtagcctgacttttttctcgtatatgaatggttttctctctgaactttacaggcaggtgccctgattaaaaatacttcaccttccagcccccaagaaggttaaagcaattttcattcctagaaaagtgaattaaaatgtctttggcacccttttcatacatagcactcacataactcatattccagattggcacggcaaattagcttcatsctcataggttagcaggttgttaggagggttttctcagaatctattcaggagagttccctttagatcagaattgtcccctttatttcacctcactcttaggtacaggtgaaggttgtcctaggagtaaatgttagtcttccctcttgagaatcattgtttaagtacttttcccaaatacaaatggattcgttggttcaaaattagtctatttcttttatttctttatctagaccccctgtactatagctagtctacaaaatatttattatgttcgtattacaggtttcttatactgtggaatatgtattggtcatcttcaaagaacacatcattttgttggggagataagactagtagtgtgaggtctccttaatagggatgccctcccttgggttgccaggtaagcatagaaactgagccatctttaaaggtgaatcatcagctcttttttgccacttggtttcacatgccaaggggatagacaattcaggactcatgggcatcctaacccttgagaccccatggcattcctaaagttctctttgtttgctaatacaccacattatcctcaatgctacctctgaaatcacactatcaaatagcccctactatgtaattctgtaactttttttcctgaatgtttaggtctattttggcatgcagggattaagaaaatagctatctgagcatatattttatagttcactaatgaaccctactttgaccctgtgggttaatgaatgaaaagtatctgctattatggtgtggtttcatcttatcaattacatatttttgttttgaaatttgtcacctttgtcttcaccattcttttctcttggacagactgttagccccttaactcatgtacttgccttgacttaagttaccagtctgtccaagagaaaagaattacattcatggcaaatgcccccagtcaggcacaacataccatatacataatattcttgatgagcttaaagtagccacacagcactcagggcagcctccactaactgattggaaataagcctatttgccatatctccctgaaactttctattaacaaagccacaaaacgcttaaacaaagaaaaattagataatatcaatagcccatcttctaacacattgcctagctcattactttcaatacatattttccaaactaaaaattaaaatctcaactctttaagagaagtttcgtaattttgtagtataagagattatcctggcaatatagttttaatgccaatatattgaaacttacatgacatttcagtggttttgcagtgttttcccaagtatggtacctttaccactgaaggtacacagtgatttctgggtgttaaacagatgaacattttttattttaatagctatacaatataaccagcaaataaaatccatgttttcatggatattattgcttagagttagttaagttttaaaatgtgatttaaaggaaaatattaagtactagtacaagagatacccagtatgacagaaatgatagtagaaggcaaaagacaagtttaagaaatgctggtttgtgtcagcagtgggcagaaaattggggactcggggctgccatgagaatgataggtgtttgatcaccacagctataggagttctttgaaagtagatctggacattttgaaatagtcaaggggaggtgtcctcagggatgtcataactgttgacctcaagaccaatgcatcagttagaaaaacattttaaggatgctcagcactgctatgtatcacagggtccctccataggacatacatacttgatctgctagcgtttttgtcatacgttagaatgaatgaatatgtgttggaatgtcttgacacagttaacctgaacacatacagctggaatccccctgttgcagttgttattatatgtaatataatagcaattgcagacagcttggattctttctcacagatattccttttgttcaattagaaattctacataattctggccgagcacagtggatcacttgaggtcaggaattcaagaccagcctggccaacatggtgaaaccccgtctytacttaaaatacaaaaattagccaggcgtggtggcgggcacctgtaatcccagctactcgggaggcagaggttgcagtgatccaagatcacgccattgcactctagcctgggcgacaagaaagaaattccatctcaaaaaaaaaaaaaaaggaaaaagaaattctgcgtaaatctggccaggcatggtggctcatgcctgtaatcccagcactttgggaggctgaggcgggtggatcacttgaggtcaggagttcaagaccagcctggccaacatggcgaaaccccgtctctactaaaaatacaaaaaaaattagccaggcttggtggcatgtgcctgtagtcccagctactcaggaggctgaaatcacaccactgcactccagcctgggcaacagagtcctccatctcaaaaaacaaaaaaaaaaagttctacataaatctgattttttaaaataatagttccctttggaattaaatcaggtatcattttagaaatgtctttcccactgccttttctactatctctcctgacccctagtccagcttcacagtagtatctctgtaacctgataaaccataaatgaacaggaattctctacagccattaaaagcaaaagatatagtgggtatcttaactaagatgataacttaaataggtatttttaaaagctacaagtctaatacaacatggaagtaatttgttgtgaggattgtaaggcgctaagtactattaaagattgctgtataaagtttgggtttgtttgaatttttgtctcctatcgaaattctttctctcaacacccttacttctctccatgtacctgcctctcttctccacaaaagatataattttgctttttagtgctatgaggacctcagggaaaggaattctataaatgcagaatattgtttttccctttatttcagatctttcacataatacagaatagcagtgttttaattttaataaccatacttttgggaagtttgctatagaatttaaaagtactattttaatataaggaatgtcaagcttttttagaactaaagttcaaggactgggtttttcgttttgcttttctaaaattaatttttttaagtgtagaaaaattagttttctgctttctgtttagtttatcttctacctcatgccctctgtaatcrccgttatcatctaacacctagcccagtactaggaggcatataataaatatttgtttaatgagtgaggaggaagtattattttttttacatattatggaatcattaaaatatttgtctgacccaaaacaatttttagatttaaacattaaggaaactaatattattagtatggtttataacttaaatgataaagaaggcctttttcctgttcatttaggtatcttaaggtaagggtaagtatagtaatgataaattaaatatataaggtatttgtacattccttgtcarttgaaaataaggttgttatatatttgcattgaaattaacatatgttgcattcattttatgtactatagtttagaagcatttaatttgagatagatttaatatataattaccctattaaacatacttttcttttgttatatacattctgtaatcttactgataagttggatcattgttgatttttaccttaaccgtcaaattcttacacacgtgtagaagtcagttgtagtaatcaatatgtaatggggaaacagttttaaaatgagtctataaaaaaccgattttgtttctctttagatgtgttctacgcaagagtgtcttgttttgatcaggagaagaaaaaataccattaccatttcttattttaactatattgtgttgttctctcatgtaatgataatgctttttgaaggaggaagaaatgtagaaagacaacccagcagtaggtacaaaaagtttctcagactctgatgcagtctgcttagtactcttcctctgctaaattaactgactaacctgggcctgaggacattattttcctctgagcaaagtcagagagtttacaggatactaatcttacccgtttgtcttgttccaaccagcagagatagctagtctgaattcgctcgcacaatgtgattgtttgcagtaatgggtattcttgctagtaagatacataatcaaaatagttgaagatgtattttgaaatatttgtttttctttcttgttatttacttttaaagaacatcttatatttagtaattcctttttgtttaattcttttcccatctacccctgtgattggtggttttcaaattaaaccatttaaaagctagaatcttctagaaaatattctccagtatgtaaatcctaggtggaaattaggatgtattagaattgtcatgtgaataactgttcactgtctaatcaagtaggtgccgtcttcctattagcaagtgccttgaagaaactaatgagaaaaaaatcatttttcttatatatgacagatccgttttccccataaatgttacacattaacatagttgtttgtacaatcaggaagtgaagaagtacagttttttaaaaacataatggtgaaatttctattcatattaaataatctatgacaaccagttcataagtttaatttccatttagcaagatgttgaagtgagtttaggccaggcgtcgtggctcacacctgtaatcccagcactttgggaggccgtgatgagcagatcgcctggggtcaggggttcaagaccagcctggccaacatggtgaaacccggtctctactaaaaatacaaaaattagctgggcatggtgacgggcacctataatcctagctactcaggaagctgaggcaggagaatcacttgaacccaggaggtggaggttgcagtgagccaggtttagttgaactagctaagaggcaagcggcaataaaatgtattcagtgaccctcttatagaatatattctaagtgaaatacatctctgtacatttgtcagtaacagtgaaacagctttttgctaaataggtcactaggcttttgaaagcagaagattatgccatttgttttgattggatgaaccagacgtttcactaaaccacataatgtgaaaaaaatgcaagtctttttctatagtttaaatgtagacatcttgaaaatgagtaagtaatctaataaattataaagacctttgaaatggttttattgttttatgagaaactattgatttgtaactttgaatgtaagttataaaataatgttacttaaatatgaccagtttacatgaatgtttttatctgatctgcagaaattcaagattatttaaatatcattctttagagtgaaagaaatgtaatcattccattaacagtgttttcacagggtactactgtgtaaatgcagaaggggtgagccctttgatatgggagaagtaattgaaattctcgtaatgagactaagaagacaccttcttcacctaactcagttattcacagctaacttagtggtttgaggtcacatgttttactaaacacctacctagtcataggatagctattttttaaaaatataataagccaggacctaaagataagaagtcacttcttttgaccagagaagtggacaaaagttagtctaaagtagagataattacctctagagctttctggtcaccatcacaactgattgaggctaaaagtaaataggaggaccagagaaactgagaaagaaaggagggaaagagagagaatagaaagaacaggcaactgtgctgcacagttggagcgctactattgttttatgtaccacattggaaatcagtgtcatgggatgcctaccccttttattgtatttttttctttttaatttcttaatctaattgaacaaatacacaagtatctgcaattgtattgttgtaatggttaaaataaaaatacatggtttttattcatttattgtcaaataccaaaatcttacttagaacattagtatgctgcacaaacattgctatgtctcactttatgggttggttgcctttaaaaaaaacagaccattcacaagtaagttgtttcactaattgttaagaaacatttttcttttatggaattcctacaaattaaaacatctgctcactaaggatttccggtgaaatwcctttatatgatcatatatagtcattgtattccagcatgcctttttgccttgtatttattcgtgtcctttcgtcttctctccaattattagaatttaaaaatgttgaaagcaagaattgttaggtttccacagtgcctagcccacagagttagtgcttagtaattaagtacgttgatttaattagattttattactgtcttctagacatcaactagtcaggcagtcttccgtctccagtctggcatctgccatctcttccgagaaactttaattaacaaaggttttgtggaaatccaaactcctaaaattatttcaggtatgcttcaaaatatttctcttaatttttaaaaataaatttgctctccccagagttgctttatattaataaaatttttaacttgagaatcccaagtgtccattaaggtttattgccatgagactactattttgaagaccatcttatatagcaacaatcatatatcaccaaccttaataagtacattttcttattccaggagtccttttgtgataatgattgtaatgtgaggcagtaacacacaaagcaagattcttgttacagaacttacaccaggaactactttcattatatagatttcttttgaaattagtattgcagttttgttttgtataaactgcattgtaaaatcagtaaatactaatgatgggaaaatttccttaattcttgttgcccaggctggagtgcagtgttgtgaattcggctcaccgaacctccacctcccaggttcaagcgattctcctgcctcagcctcccgagtagctgggattacaagcatgcaccaccacgccgagccaattttgtatgtttagtagatacagggtttctccatgttggtcaggctggtctcgaactcccaacctgaggtaatccatctgcctcggcctgccagagtgctgggattacagatgtgagccaccacgcctggctaattcttattcttgtatgagaatcttgtcttaatcattttaccctttttagatttgtttaacactagaaagtgtgttacaaatggcattttgttacaaattcacaattgaacattgcattcttaataattagaaaaatgattattccaggctgggcgcagtggctcatgcctgtaatcccaggagtttgggaagccgaggtgggtggatcacgaggtcaggagttcgagaccagcctggccaaaatgatgaaaccccgtctgtactaaaaatacaaaaactagccgggcgcggtggttgacgcctgtagtcccagctacttgggaggctgaggcaggagaatcrcttgaacctgggaggcggaggttgcagtgagccgagatcgtgccacggcattctagcctgggtgacagagcaagactccatctcaaaaaaagaaaagaagaatgattattccagctcctggggaaatttttttaaaagaggaaaaatgatgaagaatatattttttcattttaaaaaaaaaattttaacaactccaaaggggctttaatagttttgaaattgatgcagaaagggagcatatatatccacagaagtgaaataaaagcatagccaaagaagtaaatctggtttaaatataaactatttagaatcacatagaagatgatgtatatagactgtgatttagccacaattcttcattttccagtttttgttaaagtgagttacctgagtataaactttttaactagaggtttgcattgataagyttacaattgattataataatataaatataaatgtttacctttcagctgccagtgaaggaggagccaatgtttttactgtgtcatattttaaaaataatgcatacctggctcagtccccacagctatataagcaaatgtgcatttgtgctgattttgagaaggttttctctattggaccaggtaagattttggcagttatgttttatccaagttaattaattatacagcagttataattttagaaacattttacttatataatgtacagacactttgaaagcttaaattattttatctgctgactacacaaatgctagactttgagttagagataatatatttgggtagacattttcttaaaagtaatagtaataataatatggtcaatagtactttaaacagttgagcatcattccatgtgaatacaattataaacatatgtattcttacagaggaatgctgaagaaaatttttatcttgagaatatgtcattttaaaaatgcgtttcttgaaaatatacaccatctgaaatatacctaagtatatattttaatatacctcagtgcagttagaacagaattagctcccatttggactcttttcagctccctatcagcactgaagagcaggtagttgcagtggtcaaagaaatatatgtttttgtcctttataatttcttactcctgtaagtttacagtgtacctctgtctaatttgctatcaattttattccagagctgttctgtttcactattttgtttgtattgtccttactattggtaatgtgctgatgtccattagaaactactaacaaatatgttatatttaataaattatattaatatggtttttaagaaatgtttgctaaaagtcaagcacaggcacataatcatgtggcaaattcttttttgaagctaattgtaagtgaaaagccagcgttactttatttaacacttaccaagttattttatatatgttttttgataccttaataaaaattaaatacttgctaatagagaaactggcaagatcattaagggtcttaattttctgaatttattaactagttatttgttgaacacctgctgcttatataaccttgtgctaggtaccatgtacataaaagaagaaccagccagcacttctcaaatgttaatatgcacacagattacctggagatcttgttaaaatacagattctgatcagtaaatctggggagaggtctgagattctgcagttctcacaagtcctgggtattgttgatgctgctcatttccagatcatgctttgagtgataagggaatcaatattgtgcctgctcccaagactaagacatacatacatatcacagtcatagggaataatcaaataattttcacaatgaatgatcagattgtcctataccatcagcaaatgggtgttaattatgtagtataaatagtaactgtaaaaagagagaaaatggagtttgctagagtcaccataaaagaaaattcaaactgagatgtactttaaggacaaagtaggatatatagacaacagagatggagttctagacaggaagcagagtaagtaaagagcaagaactacacaagaaaacaaaaataagacaagttagtattaagaagtgagaaatataggttaggattaacttacgaaagcataaaggttttagggtttttttggtcattttatgtcttactacagtagtcatttgggaaccattgtaagtttctgagcaaggatgtattataggaatattagtgatgtgaaagatgagtcgaactagagtcaaannnnnnnnnnnnnnnnnnnnnnnnnnnnnnnnnnnnnnnctggactggatattagctggactgagctaatggctcttaatatcctcagtgccttttcctcctgtccagtcttcctgactctagctcgactcatctttcacatcacaaatattcctataaatgactactgtagtcaaatggaatacgtatgttactttattggtagagtttcacttagtttgagtcaggttttaataaaattgagaagaactcactatcttggtcataattgaatatatttttaaatattgagaagacacctcaggatcttgcattcccccagggttctcatgaacctctcttattaatttacatttggtacggcttttattgcacgaccgtaggagtttataatgaacttgctgtccaagataatgctcaaacagatggttcatcagaggtccttccagccctgtaatatgaaaataataccactggaatccaactaaataaaagtttgtatttaaatccctatttatccaaaattgaaatcagwgtttgctctctatttcttttattaacttcacagtattcagagcggaagactctaatacccatagacatctaactgagtttgttggtttggacattgaaatggcttttaattaccattaccacgaagttatggaagaaattgctgacaccatggtacaaatattcaaaggacttcaagaaaggtaaaaagtattttatgcacctagatggacttaatttcaaatgtttgggccctttaaaaaaaaaattcttcaatttaaacatacaaacttaagtttctatgaacatatatataaagatttaccagttagatgatccatttaattggttggaaaaatctacactcagaatactgcttctggatccaaatcatttgggggctcaactaattaacctctattgtgctagtaaatttaccacattgtgaacagtccaactgtattttgttgttgtttttgtttcctttatactgacatcccgaatgtctcaagaaatacagcatgtgtttcttttaacagtttatttgggaaacagtatgagggtagtgtgtaagaggttggattcagcaacatccagatagcctgagttcaaatcccagctctgctccttctctgtgtgggccttgtgcaggttatttaattctgtgcctcagtttcctcagccattaagtggaaatagcattattacccacctcagaggcaaaaagttccttcagtcaactgaatctgtcgacatgtaaattaagcctggtcaaatatggttaattcttaaatcaatttatatttacattaagtgctcagtaaagattagaaactagtagactgaacggatatttaaatctatttggatctgatgaattaacatttatagaaatattagatgtgttctagatgttcagaaaattgaatcatgtagaatgtgcacttcacctacaccctctaaactggcaaagagctcttccctttacaggtcattgaaagttgtttatttatgatgatgtttaacatagagaraataggaaaagaaaatagaaccgagtcaagttgattaagaaagtctctatttttccctctttctgtatttgtgactatatttcaagtattaggtaagctataatagtctaagctagcattttaataagtgacagaagatcatatttaaaatttttatttgaagaccagcaattcaactattccttgttgatgtatttgatatgtttcattggtattttaaaagagttcaaaaatacgaattttatttactgcattgcagggctaatgagtatgtttaagaatgtagaaattggcctggcaaggtggctcacgcctgtaatcccagcactttgggaggctgaggcaggcggatcacttgaggtcagaagttcaagaccgacccggccaacttagcaaaaccccatctctactaaaaatacaaaaattagctgggcatggtggcacgctcctgtaatcccagctacttgggaggctgaggcaggggaatcacttgaacctaggaggcggaggttgcagtgagctggatcacgccactgcactccagcctgggcaacagagcaagactctgtctcaaagaaaaaatagaatgtagaaatcaatcactgatcttaagaatactgtagcataagtgccagtatttccaggcattctctgcagctttgtacctttgatagctagttaattgcagacagcctttttctttttatatctttgttctctaaaacattttgatgcagtttattttaatcagttttcaatggttcatggaacaactgataacattttccttataagacaaaatatactttagaactacaatgaaggagcacacacagcttttctcattttctgttcgcatttataatccaagaaagtttcagaaactcattttttaaaaatactgatagcttctccattaaataatagagtttgacatttccactttgatttttataacaacagaccaagcatgaatttgagtccttgggattaatcaaatctctacttacaaattagactcaaacgccattactgctgaactttttcagtagagttaaggtggcaatttgaaaataaaaaccttctttgtatgttcttcaagtcatttaggaattttaagttttggtgtcagggcttgtttattgggttatctgacctgtgtcatgttcctctcgtgtttatcattagtatttacctctcatagaaaaatacatatacaaatgtatttgtattctattgtatgtatatgtattgtatatatatccaaatatatatgtgtataaaatacatatataaatgtattttaaagtattgatagtcatatttttgtactaccattgatagacatgatgaatgggagttgatatataaagcaaagaaaagctatttaaaaatcatttgggagctgggctcagtggctcatgcctgtaatcccagcactttgggaggctgaggtgggcagatcaggagatcaggagtttgagaccagactggccagcatggtgaaaccccatctctactaaaagtacaaaaaattagccaggcatggtggcacacgcttgtagtcccagctacttgggaggctgaggcaggagaattgcttgaacccagcaggcagaggttgcagagagccgagacagctccactgcactccagcctgggcaacagagcaagactccgtctaaaaaaataaaaaacaaatttaaaaaaatcaattatggggtctttttaacccttcttacatcaagattttaataaatcaatggctaagctttattattcccacgaaagcctgtaagaccaatcaagaaatgatagtgttttaatttcgagaatataaattctaggccgggcatggtgcacatctgtaatcctaacactttgggaggccgagacgggcagattgcttgagcctaggagttcaagaccagcctgggcaacatggtgaaatcccatctctgcaaaaagtaacaaaaaattagccggtcatagtggcacatacctgtagtcccagctactcaggaggcttcaggtgggaggatcgattaagcccagaaggccgaggttgtggtgagccaagattgcaccactgcgctccagcctgagcaacagagtgggaccctgtctcagaaattaaaaaaaataaaaatagaatgtaaattctaggtaaagaattctatatataaaatacaaacatacttttttctgtatatagaatataaacatacttttttcaagtctgttaattatggaaaaatttcaaacacatacaaaaggatgtgcaatagtctaatgagcccccatgaactcatcaaccagtttcagtccttgtcaacctgtggccaattgtgtttacccatttccctcattcactattattttgaagcaaatcccagccatcatttaatacataaatactccagcaaaaatagacatttttttctttttctttttcttttttttgagacgagtcttgctctgtcgcccaggctggagggcaatggccgatcttggctcgctgcagccttcacctctcaggcccaaacaattctcctgcctcagcctcccgaccacacccaaataatttttgtagttttagtagagatggggtttcaccatgttggccagactggtcttaaactcccgacctcaagtgatcctcctcccaaagtgctgggattacaggtgtgagccactgcacccggtcaaaaatagaccttttaaatctcaataaaatatcatcttccatagcagaaattcagctcagtgcagtaaacattgtcctgtaccttctatatatatagggtaggcattgtactatagagattatcaaaatgggaaagaaactggcactcccctgaacatacagtgtaatactgatgggggaagataagacaaatactcattaatttggtcttcctcagtgataacaagaattgttaaaggattaaaaagtcagatttttgtaatgcttcataaaatgggcattttatatttctaaccatattaactgatatgaattataaagaaaatttttaatcctttgatgttactgtggttacaaaaacgagattgaaaaatggtgttaaatattttaagtrtttaaatttcattctttaataatttgataatgcttttcctggtgtatatactgattcaaagaytgatttttgtatattgccacagtgacctcttgtgggggaaacatttatctcatacattttattaactaaatcattctgcaaataggtttcagactgaaattcaaacagtgaataaacagttcccatgtgagccattcaaatttttggagccaactctaagactagaatattgtgaagcattggctatgcttagggaagctggagtcgaaatgggagatgaagacgatctgaggtttgtctttgtggctttttttttactttaagttccaggatccatgtgcagaacgtgcaggtttgttacataggtatacatgtgccatggtggtttgctgcacctattgacccgtcctccaagttgtctttgtgatttttaaaaccttggtaatttggtttaagataagaaaaaatgaaaatattaataaatgatttttttcacctgatacacttacattttattaactttggtatacagtatgatgctsttttatataatgtgtgatctgaaataaaagtgtttactatagtttgcctaagttttcataattttgtttataaacaccattttccattattttcccctcatgtttgtaactctttaaagagtatagagagttttgcctgtgattttatcttctaatatgttacttctctttccagattagtggtattagagaaggtagacagcagtctaaatccatccccacacaggatcggggtataaactgttaacatccaaaagttataaaagtcaatattgtttatatagtgtcatacatactatattatatatagtatttagtatagtattatctaaatttagatcatacgacttataattttgaaacaaattatgtagtttaataaagattgaggctgggcatggtggctcatgcctgtaatcccagtactttgagaagccaaggtaggaggatcatatgagccaggatttcgggaccagcctggacaacacagagagatgctgtctgtacaaaaaaatttaaaatttagctgaacatggtggcacacacctgtagtcccaactactccagaggctgaggcaattggatcacttgtgcccaggagtatcaaggctgtagtaacccatgatcatgccactgtactccagcctgggtgacagagtgaaagcctgtctgtaaaaaataaataaacaaaacatgtaaaggtaatttctatctacttatattttattcaagacttccttgaatgattcctttaaaccatcacaatacatrtgtatttaggagggaaaggaaatgattattgtcactttttagggtttctcaaaaaacaattcacccaaaaccctttatttttgtttaacaaaaaaaaatatatatatatggctttaaatattgcctacattgctagatgacattttaaggcaagatgaaaatcctataagcttaggtagtatttttttaagtattttagaaattgtttttacataagatagaagctgaagtagctacctcttggccatagaaatgtaacgtgtttatataaacacttttaaaaccttggataatactaatttttatttcataaaccattgataaagagtaccaaaaagggaagattatttcatggcaagactagcccatattagtatagcgaacttttattatgtgtaattgtaggaaattacttcatccatgatatttctgaatcaatgaattgctatattctgtttattgctttaattaaatatttgagcagcatctactaagcactgagtcactgtaccaaggtatactcataagtgattttcagtagtacttgccttttaagaaaagagcagaatagacaactgcgtgttctggccaaattttgtaatcccttgagaaactcaaatagaagaagttccttattaatgtttttaagttgccatttgatcttcaaacactgatttcacgtttctttttcagcacaccaaatgaaaagctgttgggtcatttggtaaaggaaaaggtaggactctttatatgctggatttctttttctaattctgaaatgtctcttgggactaaaaacaattgcagagggktctgagcttcctagaatggtatgattctggaataaataaaaaccgaagaaggacaacattaaaaaaatttttttcttagaaaattgagaaatattcagacagcctgcctttctcccagatgatctgattaactcagtatttaatatttttacgaagttgttstgaggtgtctctaaaagtgatacctatgtcggattagttggaaatgacctccaagttatttgaaaattatttagaaatggtcttccctgtgtacccctgctgtctcatgagacttcaagatgaatgaggttcctctctccctcttatgtaatagctactttccaatctcattttctaaaaccaagactccaaagaggataaaagctaaacttagtatgatctttttaaaatttttaagataatgatataatgaaaaggaaaattagtccttgagctcctcctactggtggcagttgaaactgttagactagagaactgatatttctgaagtcatacaatattcagtttatacctttaaaatgctgtttcagcagagccagtttcagtttgtcagctattaacatcctcatctcaagttttatcaaaaatgttgaaagtcaaaaactgttggaatgtaattttttttttttttgagacggagtttcgctcttgttgcccaggctggagtgcaatggcactatcttggctgactacaacctccaccccctgggttcaagcgattctcctgcctcagcctcccgagtagctgggattacaggcgcccaccaccacacccaactaattttttgtgtttttagtagagatagggtttcaccatgtagrccaggctggtctcgaactcctgacctcaggtgattcacctaccttggcctcccaaagtgctgggattacaggcatgagccaccgcgccgggccctcaaatgtaatttatttatttttaattaaatctaggtcacatagtaagcattctctaaaaaaagtcataatttcaagttaatgtcatttatttctttcagttgtagcattcatttgaagaaaactaccaaaatctcatgtatatatctagataaaaatttaaattcttgggaagataatccatgtttttcaatgatggatattgtaaaatacatcaaatttcccaaaataattcatggacttaatatagtttctataacaatcaaaaggatttgagataatttttttcattataaaatgcatcagaatgactagatgaactagaataacaaagaaaaaagtaaaaatcaaagatgtttatcaaagtgtaatttagaatgggggagaaattagaaagggcttacatgttcaaaaaaaaaaaaaggaaaaaaatgaatatttaaaccgtaggcctggcactgtggctcatgcttgtaattctggcactttgggaggccaaggtaggaggatcatttgaggccaggagttcaagaccagcctgggcaaacatagcgagattccatctctacaaaaaattttaaaaattagccaggctcctgcttaagccatgatctcatcatgcactcgagcctaagcaacagagcaagaccccatctcttaaaaaaaaaaaatttaaaaactatggataataagtaatgcctaaaaattaggtattgcaagaatttatgacaccatggcaaaatgctrtaggataaaaatgttactgaaaaaagcaagatattcattgtatatacaatataattagagtaattacgaagaaccaaaatttttgtataaagttaattaccaaaatgttagccattttactttttaaaaatgtattttaattgcatttattctttttatagtatgatacagatttttatattcttgataaatatccattggctgtaagacctttctataccatgcctgacccaagaaatcccgtaagtaatttggttttaagtaacccattttgaggcagaagggaaattttattgtcactgtcagattgtataataggaataatggttttcattaataatttgcagttttgatagacatacgtattaccattgatgtctgtcaccactggtcaaaatgatattgtaaaatttgaatattctagaaaattagttttaaaaacctatgttaaaatcattttacttggtcatttttctgaagatttatgagagagaaagactatgtaaattataaatagtactactagatttgcatactttagtaaatcatcctgtcattgaccttaaactgggaattcacattgtatcctgggagttaataatctaaataatgtcttacggtcttttaccgtttttccattgcagtggtttctaaactttaccatgcatcagaatcacctggagggctttttaaaacaccagttgctgaggcagaatttctcattagttgctgtggaatgggagcctgataatttgcaggccccactccagaccaagtaaaaaatttctggtaatactgaagctactggtccaggaatcacactttgggaaccactggtttattgaaagacaggggattaaagtaaaaataataataatttaaagactcacacctgttaataacttggagttccaaaagtcaccccaaaataatatcattcttaaaaacatctcagatgataaagtgaaataaggatcagcactgcttcttaaaaattagatgtgatgctctgatttgttattggggggtgtggraggagagcacagaatctgatataaacaaagaaaaagttattcagccctcagtagtttaattctactttagagaacaagattgcattgttaattgtaggaaaaaatgaacttgctcttcatgcagcagagatttttttccgtatatatgtaatagaaataggatggtagtcacttgaggactggtgttttttctcttgcagaaacagtccaactcttacgatatgttcatgagaggagaagaaatattktcaggagctcaaagaatacatgatcctcaactgctaacagagagagctttacatcatggaattggtaaacaacttaaaataatttaggggagtgtatattctgaaaataatacattgtaaacatttaaaagacttctcagtctttttaaaaatctccattgaacagtaattgcttttgtgaccttttaagataaataagatgataaattatattttgttttgtgtctttttgcagatttggagaaaattaaggcttacattgattcyttccgctttggagcccctcctcatgctggtggaggcattggtaatattctgttattgcttacaaataagttcataagttctaagtataatacaaatttgaattacaagaatttttaaaagtgaattacgacataagtgaaaatttgatttccaagaaacaaaataaacagctaacttgtgtgttataaaatattattgtcataaagttctagccattttttttctcttaagaatttagaagccaaatgtcttgtaagtggagtatcctgttttctctctgctgctgtgagttcattcgcattagcacaaattaaagctctaccttaaaatagctcaaagagctgctaagtgtttttattgagatgcagcacttgattcactttaagatcacttctacagtatatgtaagggactgctctgcaatttaaaatgagcaaatatttaactcatctttggatgtccatatcaaacactcttaaaaaattttttgaatgtatagtttcattgaagtttttatttgttgtttgttttggggttttttggaaaatacaaaatgtacttacaaaattttcaaattaaaattggtcgagagacagttttttcaacagatggtacagaaaaaactaatgtccatttgcagaagattgaaattagacccttacctaacatcatatacaaaaattaactcaaaatggatcaaaggcctaaatgtaaaacctacatataaatggccaataggtatatgaaaaaatgctcaacatcactaaacattagggaaatataaattaaaacctcaatgagataaccatctcacacctctggctgttagtaaaaaggtaatggataattgttrgtaaggatgtggagaaaagggaatccttgtttktaaatagttgatgggaatgtaaarttggtacagccattatgaaaaacaggatggagattcttctaaacattacaaagagaattaccatatgattcagaaattccatttctggtcttacataccaagggaaatgaaatcagcatgttgaagagatttgtgcactctgatgttcaatgcagcattatttacaatagccaagatatagaaatgaccttagtgtccatcagtggatgaatggataaagaaagtatagattgagtatcccttatccaaaatgcttgggaccagaagtgtgtctgattttggatttttttcatttgttatcatatttgcattgtgcttactggttgaacatgccaaatctagaaatctgaartgctccaatgagcattttttggtttttttgtttatgtttttgagtatcatgttggcactcaaaaagtctcagattttggagcattttggattttcatattaggaatactcaaacctattttatctatacaatgaaataacactctgccttacaaaagaaggaaatcctgtcatttgtagcaatgtrgatgaacatagaggacatcatgctaaacaaattagcacatcaggcacagaaagacaaatactgtgtgatctcacatatatatggtaccttttaaaagttgaacccatagacaaagagtagaatggttgttggaatggggagaagatggtcaaagggtataaagattgacttaggatgattaagttctggagatccattgttccacattgaaaattgctaaaagagtagattttaaatgttctttccacaaaaaatataggtatgcaagatgatagatatgttaattagcttgatttaatcatttcacagtgtatcagagtgtcacatcatacactgtaaatacatacaatttttgtcaattataactcaataaagctgggcaaaattttaaaaataaatagcaccagttaaggtcgttacatatggttttttattttttgtttttttaagttctgggatacatgtgcaggatgtgcaggtttgttacataggtaaacatgtgccatgggggcttgctgcatctgtcaacccatcacctaggtatgaagccctgcatgcattgctctttttcctaatgctgtcccccaccccaccctcccgacaggccccagtgtgtattgttcccctccctgtgtccatgtgttctcattgttcagctcccacttataagtgagaacatgtggtgtttggttttctgttcctgcattagtttgctgaggataatggcttccagcttcatccatgtccctgcaaaggacatgatctcactcctttttatggctgcatagtattccgtggtatatatgtactacgtttactttatccagtctatcattgatgggcatttgggttgatcccatgtctttgctattgtgaatagtgctgcaatgaacatacacgtgcatgtatctttattactcagaatccacaaggaacttaaacaaatttacaagaaaaaagcaaaacaaacaaccccattaaaaagtgggcaaaggacatgaacagacacttctcaaaagaagacatttatgagccaacaaatatatgaagaaaagctcaacatcactgatcattagagaaatgcaaatcaaaaccacaatgagataccatctcacgccagtcagaatggcaattgttaaaaagtcgagaaacaacagatgctgacaaggttgcagagaaataggaatgcttttacactgttggtgggaattttaaattaattcaaccattgtggaagacagtatggcgattcctcacagattgagaaccagaaataccatttgaccccgcagtcccattcctttggatataaacatgattttttttaagagttatagagatgaatggcagtgatgattgcacaatgctgtgagtgtatttggcactactaaactggacacttaaaaatggttcagatggtagattttttatgtattttaacgctgttttttaaattggaggaggaaaaagaatagtgcgtattcgcctccctacaggaaagcattgtttctagttttcagcttaacctttgcaaagataccttttcatatacgaaaagacacacacatttctttaaatatttttacacaaattgtagcatactattatatataaaccatttagtactttgcattttttacttaatgtatcatttttttaatatgagtccggatggagaagaaatactttaatgtatcttgtaacttgtttcctatcaatacctgaagagctttttcattctttttacatctctacatagaatcaattgaaaggagagaccataatcttgttaaccaccttccaaaaatcagtttcttctttacagtcaaaacacttagtataataatgtactccagagctttttatcgtagggtccaccatgttaaatgtctataaaattaacagtaaattttctcatacttctattattgcttaagcaagtttatggctctcatcctcattgcctggactgtataatcagagtgtggtatcatttgaaacgttcaagcttataaagtcttttgttttgtttttcttattgttacatcatagattttgttcattcgtatagatttttgtggttcacattttagactccataccactcaaggatatattacttagtccttttcatttatagcagcatctttatttctgaatcaatactcaaaacagttttaaataaacccaaaataataagagtcattttctttcctaacaaggaaaagtatttagtttaacgattacatttatgtttgtagttctaagtaagaccctgagagattttcaaaaaggaattaatgattatttttgtcttccccaggattggaacgagttactatgctgtttctgggattgcataatgttcgtcagacctccatgttccctcgtgatcccaaacgactcactccttaaattcacactttgccacttaactccagtgtggatgacagagcgagaccctgcctcaaaaaaaaaaaaaaaaaaagaaagccacacttattcttttcagtaacctgctagtgcacaggctgtactttaggtacttaaaatatgcactagaataaatttgcaaggccctaaaatatcactgttatttttggagtaattcagtataggttcgtttaaaagagatttttataacttcagacatgcatcagtaggaaataacttgagaaattcatatggttatgttacaaattcatattctgttactacagtaaacgttaagagttttaaacagttaagattgtacaatttttcttcttttctatattacaagggccccagtgttaatgtcttagattttcagtatttgaacttwtttttttaaattctgtcattgagataagaataattcaggtagcatctgaaattttaatgaatgtataattggcatatcatggaaaattaaccagaaagtatcagttcttaaaagttatgcctagaaattatgtaaagctaaactacyggttagaaagtattcagtgtaatattgtattaatttgttaaattctaaacttgaatttcaataaaattttaaagctaattgtagtttttgtgtaactttgtggccaactgattttgtaagtggtgctaggcattcataatttggtaaaagaaaaaatacacaactagtttatataaataaagactaatatgttgtcaacatgtattcatttcaggatattagtttagatgggcgtagggatagagctcttaaagttgacagcttgggtcggttgacagagttcatttcacatgggttaaaatatattgcagaattttgtttgatttttaactggaatggtactgatacttagtgaatgtcagtaaaatccagtcccatcttatccgtcaaaaagaaatttttgtgtaagaattagttagaaacactttccctctagattattacaaatgttgatgctaatgttaattttacatgaccacaaatattggggaggaacaaaacataacatatttttgtacaggaagaaaaaattacatgcagaaaaatatgagggtcaaaaagttaggaagttacccctggaccacgaacatctgcccattatgtttgaaagttaaagggggtgtttaccatctatattgtacagtctttgaaagtttagattcagttcttatttttttctttcatatcctaccagaataccttaaatatagaaggcaccccaaaagtatttcataatttaatccacagcaagaataaaatatccatcttctatagtgtgtaattgctagaccctaaaatagtacaataatattggccctagagctgttcttaatttcatgtaattatagcttgtttcaaaataaagtttgtaaagtcttagaatgatgtaatcttttttattgtgaaggttttcaaacatgctgaccaaattagaacatgataaaatacacttgtacctattatccagtcttatcaaatctttatcatatttgcttcaaatatttttttttatttttatgtatttgttttgagaccaggttatgagactggctaatttttgtattttggtagaggtaagatttctccatgttgcccagtctggtcttgaacttctggcctcaagcgatccacctgccttcacctcctaaagtgctgggattacaggtgtgagccgctgcacctgacctcttatttatttatttttttgagacaagtcttgctctgtggcctaggctggagtgcagtggcatgatctcagctcactgcaacctccacctccccggttcaagcgattctcctcagcctcccaagtaggtgggattacaggctcccaccaccatgcccagccaatttttgtatttttagtagagacgggatttctccatgttggccaggctgatctcaaactcctgacctcaggggtgatccgcctgcctgggcatcccaaagtgctgggattacaggtgtgagccactgtgcctggcccttactttattttttaaagagaaaagaaatcaaaaaaaaaagaaattgtgggcagttaaggtaccctcttataggaaactattatatgaattcaaacttttattcttttgtttttatattttcactaaatatttatgtttctataaatgtctaatattgttttgcagatttatttgatatgtaaatcctgagattttcattggaactaccttaaatttatagaataatttgaaaagacttggaatttccctctctttagtcttccagtggatgaacatggtatatctcttcatttattgatttttttaattgtagtaaaacatttttattttatactttaaaagtgttttgctttttgtgtgatgttattatttatcctatcagcattttattctcaagattatcaaagaatttagtactgttaatgctggaagcaaatatctttccattttagctctatatccttgtgctttgcagatctgaagatatttcagctgagtcagaacagccttgccaaggatctgctaatcatgtgatgaagggagaaactggtgaggtagcttagtgtttttttgtgggcaggatttaatgagtactcttgaaaacaaaatattcagtgtaacaaaatttgaaagatctcaccctgttgcccaggctggagtgcaggggcaggatctcaactcactgtatcctccacctcctgggctcaagcagtctacctcagcctcctaaggtagctgggactgcaggcgcacaccaccacacccagctaacttttgtatgtttagtaaagacatgtagtagttgtcatgttgcccaggctggtcttgaactcctgggctcaagcaatccacctgccttggccccctagagtgctgggattacaggcatgagccaccacgcccagcttgtgtattttttcggcttcagcccggaaataaatgtttcccatgaattcaatcataatatagacagtactttgttcactgtagttttacttaacattagcatattaaaactgcttttaattttccagtttatgttagaacaccttacagtgttttgttttgttttttctattgggaatgaaaccatgccccaaggagttaaaaaaaaaaaaaaagttgagtaacaaattcttgggtgtggaggataaacagataagaaaaaacaacttactaacactcccctcccttataacaaaactgtctaaaatcagttaaaagcaatattgctaactagagtttacacagcaagcttgctaatgttacagcctaaagtttcaccacatattttatactaactacctccaaattggcacatgggacccataaagaggtaactacacatgccgaagaactttccagacctcttccaccaatcacctactaatcccagaatccgccccctgaaggataaaatcactgccttaacaccagcacagagagagcaatttgagctgcactcctgtctccttgtaagtcacttgaaatagaaagcttttctcaaaaacccagtgtcattttattggcttagagcattgggcagtgagccccttctgcttggtagcaggattgggatcttttccgtgacatttttaaattgttacaagggtaaagaacactatcagttatcaatttttttttcttagatggctaatttttttgtatttttagtagagacagggtttcaccgtgttagccaggatggtctcgatctcctgacctcgtgatccgcccgcctcggcctcccaaagtgctgggattacagacgtgagccaccgcgcctggcctcagttatcaatttttatatgttgccattttatgcagcagtattcttgatctcttactctttctaatagtttgtattgaatatcttgtattttcaaggtagatggagaggtgtgagaagggatagcataacagtaaaaagtatggattctgttagccacactgcctgggttcagattctggttttgctcttacattaatgtataaccttggataacttgcttatcctcagctttcctcatttgcataatcctacatcatgagactattatgggaattaaaaagtgtagaacacagaatagtgtggggcaaaataagagtttagtcttcctgtctcattcttatatttgccgattgcattagattagttcttcagtagagtgttgaataaaagcagtgatggaggcatgcttgtattgtttttatttaaatactaaagtcttgagattaagtgtgataatttctgtaggtggtttttgttttcgttgtgtgtttttttttttgttttgttttgtttttgagacagggccttgctctcttacccaggctagagtgcagtggtgcaatctcagctcactgcagtctcgaccacccaggctcaagcaatcctcccacctcagcctcccaagtaactgggactacacgtgcatgtcaccacacccagctaattttttgtatttttttgtagagacaaaaaaatgtatgttgctcagtctggtctcgaattcctggactcaagagatccacctgcctcagcctcccaaaatgctgggatatacaggcatgaatcacttcgcctggcctttagatttttaataaatgtcttttatcaggttaatggagattttattagttcattttctattatgaataaattttgaatttgtcaaatactttatcagtatttgctgtgattttttcatgttgtttggatacagtgggctataataacagaaatccctgatactgtttttctggaataaatactgtttgatcactacatattattttgtgtatgcagctgggcatgggcaacatagcaagacctcatctgtacaaaaaataaaattagccagtatggcggcacatgcttatagtcctaactacttgggaggctgaggcaggaggatgactagagctcaggcattcaaggtactgtgagctatgattgtatcaccataccctagcctgggtgacacagtgaaaacctgtctctaaaaataaacatttttaaaataaattttgtatatatactgaattcaatttgataattttatttaaatttttttcattttgttcaggtatacacaacaaaattaattttaagtgtacagttttatgaattttggtaattgtatagagtcaattaaccttcaccatactcaagctacagaacatttccactgccccagaaagtttcatagtgtatctttatagtcagtccccattgctagcaactcaaggtctgtttttgccttttctagaatttcatataaacagaacaatacagtatgcagtcttttgtatttaacttcttccattaagcataattttttgagatccatgttgttgcatatattaataatgtgtttctttttattgagtagtattccgtagaatagatataccataatttgtttatccattcaccagttaatggatatctaggtagcttccagtttttaatctataatgaataatgctgctgtgagcaatcatttgcaagtctttatatagacatgtttctatttcttttggatagatacctaagagtatattttctggattatgtaagtgtactgtcttggtctgtactactataacaaaataccatagattgggtaattttaaaaaacagaaatttatttctcatagttctggaggctgagaagtccaagatcagggtgccagcagtgactggtgagggacccagtcccttcttcgaagatggtgccttgttgctgcatcctctggagggaataaatgctgtatcctcacatggcagaaggaacagaaggtcaagaaagggtctaaactactctccagccccttaataaggtggataatccattcgtgagggcacagcctcatgacttaatcacttcccaaaaggccccacctcaataccaccacaatggggattaagtttcaacatgaattttgttttttccaacttttattttaggttcagggggtacatatgccagtttgctacacgggtaaattgcatgttgaggaggttttggagtaaagattatttcaccacccaggtaataaacataggtagttttttgttttgttttgtttttgtctctttttctggagtaggtgtttgtaagaaaattacaggtagtttttcaatcctcaccctcctcccccccttgaccctcaagtaggccccggtgtctattcctccttcttatgttcatgtgtactaaatgtttagcacccacttgtaagtaagaacatgcagtatttggttttctgttcctgcattaatttgcttaggataatggcctccagctccatcatgttgctgcaaaggacattatctcactcttttctatggttacatagtattccgtgctataagtgtaccacattttctttatccagtccactgttgatggccatttaggttgattccatgtctttactattgtgaatagtgctgtgatgaacatacatgcatatgtctttcgggtagaatgattatattccttgggtatatacccagtaatgggattgttaggttgaatgggtagttctgttttacgtttttttgagaaatttccaaattgctttccatagtagctgaactaatttacattcccaccagcagtgtttaaacacttcctttctccacaacctcaccagcatctgctattttttggcttcttaataatagctatcctcactggtgtgagatggtacctcactgtggtttttatttgcatttctctaatgattgatattgagcatttcttcatatgcttgttggctgtgtgtcttcttttgagaagcgtctgttcatgtcttttgcctgttgttgtttttttttgttttgttttgttttgtttgtatttttagtatagatggggtttcaccacgttggccaggctggtctcaaactcctgacctcaagtgatctgcccgcctcagcctcccaaagtgctgggattacaagcgtgagccatcgtgcctggccctaactgatatttttaagtgaatgtatatataatacattactatacagatgggttagataagaatatgttttttaacataggctcctgtgatccctggaagtttttttttttctttttttcttcactgtatatattaggatctggaagtatttagaccattaaaatagcctgggttttgttgttgttttttgtttctgggctacggttagagacttctaagtgatactgcctttggcaatgtctaaccataaagaaaatacaacattctcctaatttctgtttcagttcagttggctggcacttgagggtttttctagattttgagttgtatttgctacctgctgcgtcagtttctcaaaagtcgggtagactcagattaatacaaacagttttatttttccaccttctgccaaatgtcaacatctgcacaaatgattggc

SEQ ID NO: 95284 - DNA, 48594 bp, Homo sapiens
atatttaaaatgataggttattatgaattgaggagtatatgaaagttaaaagtgagtgtattagccaggttctccagagagcagaactaataggaggggggggggggcagatttattatgaggaactggctcatgcaattaggagactgggaaatcctatgagctggcatctgcaagctggaaacccaggaaagctggtaggtagttcagtctcaacctgaagggctgaaaaccaggggagacaacggtgtaaatcttatctgaaggcatacgatgagacaagatgtcccagttcaggcagtaaggcagggaaaagagggcaaactcctctttcctctgtcttttgttccattcaggcccttaactgactggatggtgcccacccacactgggcaggccaatctattatacagattctgtctattcaaatgctaatctcctccagaaacccctcaaagacacaagcagaaataatatttaatctgggcagcccatgacccactcaagttggcacataaaattaactctgtgtgtgtgtgtgtgtgtgtgtgtgtgtgtgtgtgtgtgtgtgtatggaattctggtgttcagcttttggaaaaactaagaatcatataaaaataactaaaaattgccattatttgaacttattttgttagacatcatagttgaacttattttgttagatatcaagatcaaactttgcttatttaagtaattaggaagaaagtcatactgctaaaaactggttagcagctagcatacatttgttgttgttgttgttaataagaagtagaacgggctgggcacaatggctcatgcctataatcccagcactttgggaggctgaggcaagagtatagcttgagcccaggagtttgagaccagtctgggcaacatggtgaaaccccatctctgcaaaaaatacaaaaattagctgagtatggtggtgcacacctgtagtcccagctacttgtgaggctgaggtgggaggatcacctgagcccaggaggttaaggctgcagtgagctgtgattgtgccactgcactccagcctgggtgacagagtgagatgctgtctcaaaaaattaaataaataaataaaaaagaagtaaaatataccaaatattttataagatgagggttgactgcattgaaagaaaatatttcataatatgagaaatatcttattgaatattgcacaccacccacaacaaatcatgtaactttttaatctgctggttttatttagtgtaagttgaagtgtcagtgattctggaaaatattacagttatatttaaaataataagcatcactaacctgcactgctacagctgtttgaaggatgtttccttcccagctaaaaacatgtctcaggaaaaagaacccttatgttttagaaaatcattctgaaatatctacaaatgaaaagatacaatgttttgcttcaaaatcataaggtaatggtaagaaaccgtatactttacctctgtgatcatccttccctaacccataatcactgtctaatcatgagaaaaacgttagacaaatcccaactgagagacattggcattaaaactatggaaagtctgagaagctgttacaaaccagaagagtctaagaagacatgaccactaagtgtaatgtggcatcaggatgagatctgggaagagaaaaagaacagtagggaaaaactggtgaaatctgaataaattgtgcaatattagttaatactaacatactaaagttggttcctgagttgtaataaatgtattataagagtgtaagatattcacagtaaaggaaaataggcaaggtgtatttgaaaattctgtactatcttttgcaacttttggtaaatccaaagctattctaaaataattttttaaaaagaatcatggatggctgggcatggtgtctcacacctgtaatcccagtactttgggaggattgcccaaacccaggagttcaagactgacctgggtgacatgaggaaatcttgtctcttcaaaaaatataaaaattagccaggcatggtggtgcacatcgtgggaggctgacgtgggaggatcacttgagcccaggaggtcatggctgcagtgagccatgattgtgtcactgcactccagcctgggtgacacagcaagaccctgtctcaaaaaaaaaaaaaaaaaaggccccagtgtggtggctcacacctgtgatcccagcactttgggaggccaaggcaagaggatcgcttgagcccaggagttcgaggccagcctgggcaacacagccaaacctcgtctctacaaaaaatacaaaaattagccaggcgtggtggcatgtacctacttggaaggctgaggcaggaggatcgcttgatcccaagaagtcgaggctgcaatgagccgtgattgtgtcactgcactcccgcctgagtgacacagcaagaccctgtctttaaaaaaaaaaaaaaaaaaattttagacttccaggtattcagcataaatcacattgtacagtttaggtacaatgagccatcattatcaagggatagtgttatatcgatgtagagaattatttaccagtcaagttcccaatgccagccaaaggccaatcttgtgaacaggactttctaaggatagcaagcaggcctgggcaccagtgcacacacatagcatacaactttctggggtgtgacagagatatttcataattcataccctcctcctgttgtggaagttatccctacaaacctcacttacagacatcatctactattctgattcagagatacatgtctgaaggaggaagggaacacctgtgagatatggagagctgagaagaggaagccttgagtttctcaatgagcatagctgaaaatcagcccggagctctgcactatcatttttgtttttttccttctgtacatgggactttagttctgagaaatctatcctgaggatagaagaggaagagaagggagaagaagaaaaatgagaaagaaaagagtgaggccttttgagaggatggaatagaatcaggttagctcaatcgggttgtgaatatccaggaagcactgttgagttcaagcttcctaaaatatgtacaagtggtgatgtccggtaggcaggcagactctagagctggtaaagggctgtaggacacagagcctcaagtgttcattttcttttcttttctactttttttgagacagagtcttgctctgtcgccaaggttggagtgcagtggtgcgatctcggctcactgcaacctctgcctcctgggttcaagcaattctctgcctcagcctcctgagtagctgggactacaggcaccgaccaccacgcccggctaatttctgtatttttagtagagatggggtttcaccatattggccaggctggtctggagctcctgacctcaagtgatccacccaccttggcctcccaaagttctaggattacaggcatgagccaccgcgcccggctgagtgttcattttcgggttttttttttttttttttttttttttttgagaaggagtctcactctgtcgcccaggctggagtgcagtggcacgatctcggctcactacaagctccgcctcccaagttcaggccattctcctgcctcagctttccgagtagctgggactacaggcgccccccaccatgcctggctaatttttttgtatttttagtagagatggggtttcgccgtgttaaccaggatggtcttgatctcctgacctcgtgatccgctcatctcggcctcccaaggtgctgggattacaggcgtgagccaccgtgcccggccgagtgttcattttcaaatgaggtaatacatacgattacagatacactgcaacacgccagcattgagcttttttgttaaactctgtaaatatcttgtgaatagtgtatttgtacgtatgttaaaataattacttgagcttctgtccactctgtttggcattttaaaatcttttcaggccgggcgcggtagctcacgcctgtaatcctagcactttgggaggccgaggtgggcgaattgcctgagctcaggagtttgagaccagcctgggcaacatggtgaaaccccgtctatactaacatacaaaaacaaaaaaacaaaaacaaaaaaaatcagccgggcgtggcggtgtgcgcctgtagtcccagctactcaggaggctgaggcagaagaattgcttgaacctgggaggcagaggctgcagtgatccgagatcctgccactgcactccagcctaatgacagagcgagactctgtctccaaaaaaaaaagaaagaaagaaagaaagaaaagaaagaaaaaaaagaaaaagaaaaaatttttcaataagttggatttggtggtggcaggaaatcccagctactcgggaggcggatgcaggcagattgctggagaccaggtgttcaaggtcagcctgcacaacatagtaagacctcgtctcaaaaaaagaaaagaaagaaaaaatatttttaatatgcaacaagcctcaaaaaatggaagtggtccccgtttctcttaatgtcttggaggccaaaaaaaggtactggttggtgaaatacacatatagatatcatcagtacccagatgttaattaacgccaagggagtgtaaagggtcgcccaagagagcgactttacgggaaaagaaggctctggaaccagaacatttaaaagactcactgaaggagaggcgcctacaaaggatgctaatcaggaatggccaaagagatggcagaaaaaccaagtgaaatggttagggaaagatgggggaaaaaaacataaggataactcaagccaatagtgcattttaagaagggtattaaggccgggcgctgtggctcacggccgtaatcccagcgctttgggaggtcgaggcagacggatcacctgaggtcaggagtttgagagcagcctggccaacatggcgaaaaccctgtctctactaaaaatacaaaaattggctgggcatggtagcgggcgcctacaatcccagctattcaggaggctgaggcaggagaatcccctggacccgggagctggaggttgcagtgacccgagatcgcgccactgctctcgagcctgagcgactgggtgagacttcatctgaaaaaaaaaagaaaagaaaaagaaaaaaagattaatcaaagtgtcaaatatttctttctttttctttttctttcttttttttttttttttttttgagacggagtcacactgtgttgcccaggctggagtgcagtgacacgatctcggcccactgcaacctcctcctcccaggttcaagcgattctcctgcctcggccacccgagtagctgggattacaggcgtgcaccaccacgcccgactaatttttgtatttttaggggagatggggtttctgcatgttggccagggtggtctcgaactcctgacctcaggtgatccacacgcctcggcctcccaaagtgctaggattacaggttgtgagccaccgcgcccggccaatgtcaaatatttcgctgattttcctcggtcagcaccaccacaataattgtgccaccttacccatgcaaggtttagacatctctttgactcttttacagggttttatactgtggtttccattatttcctctaactagacagcagaagcggcttactcatttttctcttccatagagtcttactccgatcgttcaattaatatcagtggaatgatttaaagaacatttgaaaaaccactcggacaaaaccctcagattcgaacttgttccagcagccaaaaatacccgcgggccacggctacactgcgcaggcgcaaaggcagatgggctttctccagaagggctttgcatttggcgcgaaatccctttccgtgggctggggctcttggagaggcgccgttcattggtcaggtttggcgcgaaatctccagctcctgtgtcacgattggttccggccgtgcaggtcggaagagggggcggggcggaagcggcggcggcgcgcgcaaagctgcagcgtctggaaaaaagcgacttgtggcrgtcgagcgtggcgyaggcgaatcctcggcactaagcaaatatggacctcgcggcggcagcggagccgggcgccggcagccagcacctggaggtccgcgacgaggtggccgagaagtgccagaaactgttcctggacttcttggwggagtaagtcggcgagcgccccgggcctcgcccgcctccggagcctgcggcgsctgggcrrggcggtgccgtgtgggcggcgggtgttccggaacctgggggtcgcgcgtccgggaagcgcctccccgcccgccccccaactttaggctccgagcccggcggccgcgaggagcctgggacaggctgggtttttctggagtaaaacccatctcgagccctaagacgctcgtgcccagtgctcagcgctttgcttctgtcacttgatgctcaccaccccgcgagcctggtatttgcacagccctcggtgaccggcgcggaaacctgggctcgctgagtatagtaactgggccgctgggtgcggccaggtcgagtgggaggccgaagtgccattgaatctcgtcggtgccctgctgggccacgcagccgggagcatggtgctgggggttcgcagggcacgggccaccctcgcctcttgtgctgatgaaagtttctgcgtcaactgtggtttgaaagctgctggggggcggagccctgccctgcagagagtagctcaccatatcccttcttctgggtcccttgctcccctttccctctggccttcctttcctttctctactcttctttttttctgtgcctctgggctcctagcttcataaccccaacctcctccctggcttgcctcacccaccggttatttttcctggagcagatacaccacggcctccaggatgaagggtcagcagtttggaatggcttttgaagttcttttttagtaaaatatacataacaaagttgaccattttagccatttttaagtgtasagtccagtggcactaagtgcattcacctcgttgtgcagccgtcaccactctcccatctccaaacttttttttttttgaggcgtaatttagcccttgttgcccaggccggagtgcagtgtcaccatctcagctcaccgcaacctccgtctcccgggttcaagctattctcctgcctcagcctccctactagctggaattacaggcatgcgccaccacgcccggctaatttggtattttagtagagatggggtttctccatgttggtcaggctggtcttgaactcccgacctcaggtgatccccccgcctgggcttcccaaagtgattacaggcgtgagccaccgtgtccggctccaaactcttttcatcttccaaactgacattctgtgcccattaaacacgaactctcctccgttaccctctccctcagccaccgtcacccaccactctgcttcctttcattatgagtttgaccactctaggtacctcatataagtggaagcgtgtagtatttgtccttttgtgtctggcttgtgtaacataatgtctacaaggttcctctgcgaggtagcatgtgtcagaatttccttactttttaaggctaaataacattgtctgtacacattgagtatcccttttctgaaacgcttgggaccagaagagtttgggatcttggatttttttttcagatttggaatgtttacattatacttaaccaattgcatccctaatttgaaatgctccagtgaaaatcatgtcagcactcaaaaagtttcagattttggaccatttcatattttaaattttcagatgagggctgctcaacctgtatatatactgcattttgcttatccattcagtggacacaggttcattccaccttttgtctattgtgaataatgaggttcattccaccttttggctattgtgaataatgctgccttcttaggaaattttggtatacttaaaaccataatttaatttccatttcactacctatggcaatgttattgtctgcctgatagttcctccttcaaagcccagctaaaaactcacacctttgtgaaaccttgtacacctttttgagaggcactaatcctttcttccttaggctcccagggtgctgtttgtttttcattatctctggcagtgtaacacatttacctcctagctacttagtctggaattcaaattccatcctcaaccccacctacccaccacatcacattacaaaggtttttcaataaacgtttcatttcaacaaataatctaagtgccttgactttgcagctagatgataatgatgagacaaataatctctgtgctttgtttaaagaaatgccaactccctgtcacaaaataaactttaattcaccattgcttgtggaataaagttcaaattcttcatcactcctctttcctgtttgtcttacaaaaacaccccagtcatcatccacacttctcccctaccttctctgacttaatcacattcttggaatcatctagtcagtcacttcaccacctgtttttatttgaaatttttaactctttcagaagctgaattccaacgccaccttttatatgtatracttgtagttgtttttttaggcagaattagtttctattcccctagcacatttcttgttcttctcattaacaggaacatctttcttgtctgtcttcattgcttacatgtctaactccctagacgcagacaaagtgttagttaaccctagggcaggaacaacactgccattttcagcctcagttatagggctttgcacgtagttgtttaacaaatattttaaggagtcagaacatgctgtatatggaggagaaattgattttttcttaaggcgaatctgcatattatgtttgaaagaacagaaataaatttgtatgatatcctgcttgggctttagaagcaaaaataccagcagctttatttagtgtgcctgtttcaattttccckaagtcttgggctgtgaaacacctcatttccatgtattcttayttctgttctgcttcttaaatccctgactaatttgttagtttgcaaattccctacagaaatggaatcattgggtttgagactgaatttcttgatttaacattttccaatcttaattatacatgacagtagtaaaagaagagttagttgttgggtttttttgttagttagcagttaaacctcacaatcatggtggaaggcaaggaggagcaagtcactgatgtcttacgtggayggcatcaggcaaagagagcttgtgcagaggaactcctctttttaaaaccatcagatctcgtgagacttactatcagagaacagcaggggaaagacttgtccccatgcttcaattaactcccaccaggtgcctcccacaacatgtggaaattcaagtcgagatttgggtggggacacagccaaaccatatcagaagggaggagtaacttgccccaagttacagaactgccaaacatgggcctgtctgagcctagttgttggactttaaccaatgttctgaattatcattcaggttctttgtactgcctgtgtccttaatctagttgactcgaatgtacctgcaggtttcagagcagcgatggagaaattaaatacttgcaattagcagaggaactgattcgtcctgagagaaacacattggttgtgagttttgtggacctggaacaatttaaccagcaactttccaccaccattcaagaggagttctataggtatgggcatattaatcttctttactttgaataggggttgaaatccgggaagccagctcttcttggactgtaagtgttcacttgtgtagcagaaggkcagctttcacagttatttcccactgagaagaggcgctttgatactgccagtggtcgttttagtactgctctgaacttcatgtaggcctttgtagagccgaacgtttttttgttgttgtgttttgtttgtttgtttgtttgtttgttttttgagacggagtcttgctctgtcacaccyaggccgaaatgcagtggcgcgatcttggctcactgcaacctctgcctcccgggttcaagcgattcttctgcgtcagcctccygaatagctgggattacaggcgcccaccatcacgcccggctaattatttacattttttaatagagacggggtgtcaccatgttggtcaggctggtctcgaactcctgatctcaggtgatccgcccgcctcggcctcccaaaatgctgggattacaggcgtgagccaccgtgcccggccagagctgaactttttttttcaaatacaaatgttgaaaatctttgctttctatatagttttcccaagaggaaaactgtacttacttacttttgtgtcattccattgatcctttttccccacaggaataggtgtttgtgtgggtccttttcttgtactggggatatctttacagcattgacgttgttgtacttcttgttcccttaaagtttaattttgttttcgcttataaaagtaataggtatatattgtagaaaatggagaagagtaaggagaattaaattgcttatacacttgtaatccaccaccgtcattagcagatctgctacaacagagttccaggagccttccaagtctgcaagtgcagagttttgtaaggatcttctgtcacattttgatgtctttgtgtgtrtgctgtgtatgaaattactcaaattcatataaaatttcttaaactcatactaatagctccaattgtggttttttggtagaaatactatggttagacattatatttaatagaaggcttttattttgttttgacttgttatatatagcaagaaacatctttgcacacaagactttgtattaggattaaataaatgtgacagtctatagaaatagaatcaggttaaaataaattgtggacagttgtgaaagataaatgaaaacccagggataaggaggcacagtctcgttcatttcttagtagattaggagatggaggatttgtctgtgtttctggtcatagctgatgatcaagaataattggagggggtaagtaagcaacaggatttattgtgaaagcatgcagcagtagaagttatagcactgacaaataagggagaggtagacaatcaagcctggtggtagaagcagctgtgccatgcctcatgcacaagccaggcagcagttctctttcctgagagtagcgccttttttagagggtttcagaccccacttcttaaacaaactaagctggagtaggtattagaaacatatcaaaaggacatgcatacttcactctcaccagtcaaatggagcatttttgccaatttgttctcacattagtgcacaaatacttctcctgtcctcatccatttcttatcaaaccagccagatgtggtggctcacacctgtaatcctaacactttgggaggctgaggtggatagatcacttgagcccaggagtttgagaccagcctggacaacatggtgaaatcccatttctacaaaaaaaaccccacaaaaattagctgggcatggtggtgcatgcctgtagtgccagctactcagcaagctgagatgggaggatcacctgagcctaggtagattgaggctgcagtgagctgtgatcgtgccactgcactccagtctgggtgacagagtgagaccttgtctcagaatgaaaccaaagaaattgactgacttgacacatgacttactaagtcataaacagcccacagaaaattcacagtattgagcataatattgacaagatgattgttcagctagtcatcttggacagaggaatggccaacagtgtgggtgctstatgattatttatgtgctatatgataatcaggtatggtatgacattttatatttagtgttcmggtgggataggagagaactgaaagagggtcctaaacctagagtagataatagaagtgtcctacacagttaagttctaaggtttagttgtaaccagatgaaattccttaatctcggctgttggtaggtatgtaaagggaaggaggccttggtaaacctctaaggtatcagctgacttttttgtttttyagagtttacccttacctgtgtcgggccttgaaaacattcgtcaaagaccgtaaagagatccctcttgccaaggatttttatgttgcattccaagacctgcctaccagacacaagtaagaaacccttctctggaaaaaaaggaattcaccaaatggtataagtaccacttagctgacagtcagaaaacttgagaggttgccttgatctgctattagctggctatttaacattatacaaatcacttttacctccctgagcctcagtttccttgtctgtgaagtcttttggcttaggttttctacctaaatcatgcaaaaaataggtttgttgctgtaaaattactttttcataattgataatcacaataattataaaacaagtacttataaaattgatgctgtaaaataccaggaggaaaaaatagtggtttgcattcagattttgtagaaggttgacttttgtaggagttatacccacttatccagaaagtttagtgttggagaaatgtattttcctatggagatgggattagatgtaaagggagtgaagcaaatttttaggattatcacattttagggcgccttttagggaaatttgggagaaaattgatcaagggagaaaatatgaaattctagaaattcctgaatctctggaaatttttgttggtttaaatgcataattttcaaacacccctttggcagttattttaagaataaatttactggataaaattgaagtgatattttgaaaagttaaactactgaaattataaaattaccaaattacttcacataaaatgggtttgtaaaggaagtgtttctgaactttgagtacaaaattttttctcatgataggattattatgtaacacatgcttttttttttagaaattgcgggtaagcaaaaaagtatttgcatataaaacaaaaacaggatcattctgtttttktttttttttttttctgagacagagtcttgctctgtcacccaggccagagtgcagtggcacgatcttggctcactgcaccctccacctcccgggttcaaacaattctcctgcctcggctccccgagtagctgggattacaggcgcccgccaccacgactggctagtttttgtatttttagtagaggtggggtttcgccatgttggccaggatggtcttgatctcttgacctcatgatccgcccaccttggtctcccaaagtgctgggattacaggtgtgagtcactgcgcccagcccgttctgttttataattttaattttcatttttttggcatcctttagttcatttatatattttgttctggatacatatacgtcatataatttaggattgggcacgttgactaaattattcttataggagagtccaaagaataccttgtctcttgaattttttttttaaacataaattatctttgaataccctctcactaaaatggaaagattcttagttaagagatgaatgtttactaatgggacatttgtctttaaacaggattcgagagctcacctcatccagaattggtttgctcactcgcatcagtgggcaggtggtgcggactcacccagttcacccagagcttgtgagcggaacttttctgtgcttggactgtcagacagtgatcagggatgtagaacagcagttcaaatacacacagccaaacatctgccgaaatccagtttgtgccaacaggaggagattcttactggatacaaataaatcaagatttgttgattttcaaaaggtatttatttaacatctgtttagatcagagtccatctatgataataattcacttctaggcccttgcaatagcttatttagataatgttcaactcaatttttaygtaagttaagcatcatcaaaatgactacaaagttaagcccaaaactgttcatgtaaattataattgttagtatrtacatttgttttaactttcagtaacttggaagttccttaagactgacaagatgtatttgtcaaagaataaatggtaactaggtggtggtggttgtcattatgaactggagttaagaaaacttaaagaaatagcaacttgttagtgtaagatttccatttgctgcatagaaaggaaagcatgaataggacaggctagcttggaagcaatgaggattatcatgattgaagtaaaggagccaaattggagatcatctgagagatgatttgatgtgagacctggaggtacttggatccctaaatcttaggctgaggagtttgagcctatcttaataagcagtgggaatatagtgggaaggtagtttgtgtgtgtgggtgtgtgtttgttttgttttgttttttgtytttttttgagacagtctctctctgtcacccaggctggagtgcagtggcgcgatctcggctcactgcaagctccgcctcctgggttcacgccattctcctgcctcagcctcccgagtagctgggactacaggtgcccaccaccacacccggctaattttttgtatttttagtagagacagggtttcatcgtgttaaaccaggatggtctcgatctcctgacttcgtgatccgcctgcctctgcctcccaaagtgctgggatacaggcgtgagccactgcacccagcctgtgtgtttttttttaaaagcaaactgaataagtccgtgatgggtttaacagagggtaataggcaatttcagttacctgggcaagaggtgatggatggcagtagtaagaatgaaggggaccctcagatttcagcaggacttaattttatgggacatacaaaatggaaagaaaagctgaagcagctcaagtatggaataattattatcagatgaatttaatattatttatattgctctgataatcattctccttatttggctttcttacattaacctggtagcttataagatgcacatattttaccaacagctttgggtaggagatgtcttatcttataaagtatgaatctagattgggtcttagtttgsgggggggaacacaactgtataaaggacactcttgacaagacatttgaagatggactagataatagaagatatgtaattttatgaaattaaatattgtttaattatcttggttgtgataatgatattgtaacaggattgtctttattcttagagatgaatgctaaaatatttaggtatgaagtttcttgatgttcacaactgtgttcaaatacatagtaaaaaaacatgtatctgtaaataatgttagcagttgtgttgaagtggagggtataaaaggtgtatttgaaattttctgtaaaattatcttaaagcttaggagaagatggagcatggaacagatatttggagtcattttgaacaaagaaaaaaattattttttaatgagtaaaagtgaagttttttttttctctgctgcttgaatcatcatggagtttttaaatagatgtaatctcttgccaaattgaactatttgactaaaaggagttttagagtagataatttttaggataaatgttggtacatgtgaaaagtctgctaatgggtcagatagtttagaatacgtccrtatttgtggtatttaatttagattatatggcatctgaaaggtattgcttctcattcttggttggttgkttgtctgtattacaggttcgtattcaagagacccaagctgagcttcctcgagggagtatcccccgcagtttagaagtaattttaagggctgaagctgtggaatcagctcaagctggtgacaagtgtgactttacagggacactgattgttgtgcctgaygtctccaagcttagcacaccaggtcagtaatytgtggctcaaatttaacaaattctcagttacctaaactgcacagtatctagcttcccacatcttcattgtcttctttttggctaccaatcagaagctgaggaacgaagtgtgatgagaataaaaacaaattggttttgccacaaatggtgctattctgaaagtattcaaggcttaagtgaagtctttggatttatagctttcatttatttgagcaattttgaygttcagcacctttaatatttaagttgtgaaacaacctatcattctgtttcaggagcacgtgcagaaactaattcccgtgtcagtggtgttgatggatatgagacagaaggcattcgaggactccgggcccttggtgttagggacctttcttataggctggtctttcttgcctgctgtgttgcrccaaccaacccaagggtcagtcgttttgggggtttttgtttgtttttgaracagtctctctctgtcacccaggctggagtgcaatggcaaagtcatggctcactgtagcctccactttctgggctcaagtgatcctaccatctcaacctcctgagtagctgggattataggtgtgaatcactgcacccagctaattaaaaaaacttttttagagatgaggtcttgctctgttggccaggcaggccaacagtgagtcttagtagagtgacagcttaagaaacacctaccctgagctgccacgaaatgataggattctgaaacatctgggctgtctcatcaatgttgagagcacgggatggggttaagatttgatgagttttaaaaccaaatcttttgacgtatgcctttctgatcttgaaaaaaagtcttatttgatgtcttacataaaagctcaatgcttttaagtgcagtggtacaaattatccacgctgttttttgttttaaagtttcatagttcctctgttattcttctggaggaaatacaaataaaaagatttagtaatctgggaagtaaacttctgagaatgatgaacccctggcagtatcattcagttaacttgattctgtgtcataaatgggagtttggaaaatagttcagtattggaaaaagggagtgaacataatattctcttattttatttgcatctttatgtcagtgattaacattctgctatcgcttatctcttgagcattcaggtagctttttttctatttaactcactggacaaatgacatacccttaagtgtctttgttaactgagggcttactagtttggggagttgtttttttttaaacctttacagtcaataaattgtgaggttgacttcccaygctatgttgtgtttgtaatgaagtttcttctcctttatgctcttttgactgcttctatactaatgattcttcctttgttctctaccattagtttggggggaaagagctcagagatgaggaacagacagctgagagcattaagaaccaaatgactgtgaaagaatgggagaaagtgtttgagatgagtcaagataaaaatctataccacaatctttgtaccagcctgttccctactatacatggtaagaattccatccatttgtaccataaacttgaaatcamaataatgattataaacagccacaggtgatttctgaaagcacataaatcagactgtgaaagtttttagtgggtctgaaagaggtcatttacaaaaggacaggtacatgatttcacttatacgaggtacctgtaatgtgcaaattcatagagacacggtaggatagaggttatcagtggctgggggaatgggagaaatgagttatttaatggataaagttgctatttgggatgatgacaaagttctggaaagggatagtggtgacagttatacaacataatgtacttactgccactgaacttatacactgaaaaatggttaaaatgatragttttattatgtatttttatcacaattttatttttttaaggaaaagttattttgtcatcttatttcctggccttatgacagagctgcacttaagtgtgtttccatatgckagactagtctcctggcctttttgtggttgtagtctcctggccttgttggtgtgtgtgtatgtgttttagagagacggggttttgctatgttgtctaggctgaagcactccctcctgggctaaagcaaccctacctccagcctccccagtagctgggattacagrtgtaggtcaccacattggctcttgtttctctttttatttaccaaaatggagtgtttatgattggttacttgttctgtctatacctttggcagtttcacattttcctgactcttggttgcaagctgtgttttgaaggctatgactaaaattttaggcctgatgctttatctttgaactcttccatccttgtcttccatactcaattaggattatggtaagaactcaacctttttttatctttttttattctattttattttgagacagagtctcactctgtcgcccaggctggagtgcagtggcgtgatctcagctcactgcaacctctgcctcccgggttcaagcgattctcctgcctcagcctcacgagtagctgggattgcaggattgccccacaacactcagctaatttttgtatttttagtagagatggtgtttcgccatgttggccaggctggtcttgaactcctgacctcaagtgatccatccgccttggcctcccaaagtgctgagattacaggcatgagccactgcatccggccctttttttctatctaaatataagtcagagaagttttgtttgtggaagggatttttagttttctacctgttttgttttgttttgttttgttttgttttgttttgttagggtcttactcttgcccaggctggagtgcagtgacagcatacattgcctactacagcctcaacctcctgggcttaaacgattccccaccacagccccgaaattagctgggactacaggcgcctgccaccatgcccagctaattaaaaaaaatttttttttttagagatggggttttaccgtgttgcctgggctggtctcaaacctctgggctcaagcaatcctcccgccttggccttccaaagtgctcggatcttccagagtgatcagattacaggcataagccaccacacccagcctaattttctgctttaaggaatgccttgtgtaactttgcatagcactttgttgatggagttcagagagtcgacagttccacagaaaaatgtttcttttaatagcacagtgttcttttttaagaaaattgtttttccttcttattggatttatgaactaagcagctgtaaattgcattcagcatcttatttaatccacatgaattcagttaacatatatttattcagtgctggtcactgtaggtgatagaaaagtgttatgaaccatttcctcaaactcttcacagaactataagaactggcattaaaaaggactagcaaatgtggtaggccttggtggacatagttcatttatcaggagagatctttgagggctaaggcattgggtaaggttttgtgtaggaagtaggactcatggacaagtaaaggctcttaggatggtgagcactggcacggtgacatctgtggtgtaggagaaaacattggaacagtggtttaggtgactaagtccacagaacaagaaccaagatcggaagccaggtgttattactccagttttatgctttgctttagctgactctgcctttcggttggtaaacatgcctttactgtttcttctgaaagtgtttaacttcatgttgaaaaattagtttttcatctgtagcttcttttcatttcaggcaatgatgaagtaaaacggggtgtcctgctgatgctctttggtggcgttccaaagacaacaggagaagggacctctcttcgaggggacataaatgtttgcattgttggtgacccaagtacagctaagagccaatttctcaagtaagcgtttgcctgatacagtgttgcaggaaaaagtgtacatagttcccaggctggctgtgctaccaagaatgcagtcagtatggccttactaggagtgtaaattatgactatgttgaatatataattctcatagattaaagttatggcaacattgtacaattttttagaatagggaaaaattgcctgtaataccaatctcacattgaactgtttagtctttgtataatatctttgtaaaatatatttgtataaaattttatacaaattttattatttgtataaaattttatacaaattttattatttgtataaaaatatgaattatgtattttcattattgtaaatcatattatacatacttgtaatttcaattttctataaacattttttccatgtttcttttcgcatggaaaaatctcatgagtttgtcattttcacaattgtctttttttgttggtatactatagcttacaaaatcattttcttagccctgttaaatttaacaggatagtttattataataattaccgatatagatgcagtgaacatcataatgttatatacattttttgtttgtttcctctgggtaaattgctagatacaggattgttgagactaagaatacaaacatttgtaaggttttaaaataggatgtactggccgggtgccatggctcacgcctgtaatcccagcactttgggaaatcaaggcgggcggatcatgaggtcaggagatggagaccatcctggctaacacggtgaaaccccgtctctactaaaaatacaaaaaattagccaggtgtggtggcgggcgcctgtatacagtcccagctacttgggaggctgaggcaggagaatggcgtgaacccaggaggcggagcttgcagtgagccgagattgcgccactgcactccatcctgggcaacagagcragactccgtctcaaaaaaaataaaaataaaataggatgtactttccaaagggaatgctgctatgagatattttatgttaactttgtcagtgtgaacacaatttttgactgtttttagaagctataataaatatttgattactttcaaacttttaagaaacttagggcccaaaataaaagcaacaagtttctgagcacctgccatgttctcagtgctgtatatgtgttatgtcttactctagcagcacccagacaggcatgtgtattattccctttttttttcagagagtcacaacctctccaagcctacaagaaatttgcccactttcttgtaggtgaaaggtgacaccgagccatgaatattaaaattcagatacagttgcctgcaaaacatgtgtacttcatactacatcaagctgccttttctttgttttggaaatttgtagcatagtaccattttagaatattgaacatttttagttggtttggagttttatgattaaatatttcttttgaacatatcacagactgagttttagattttaagatagtagtcctgtgttacaaaggattcttttttttttcttgtcattctttctcccccctcaaaaagaaagatgtactacaatgttgcctctggtaacagtgtcatgtggtatgtgacagtcttagtggattccatagcattttctatgtataaaatctgtatataatgatagtcggagtatccmatctggctgcctttttttcttgcctaattgtccttgattagagccatcagtataatgttgaatagaagtggcaagagcagacatccatgtcttattcctgatcttaggggcaaaacattcagcctttcacctttaagtttgatgttatctgtgggttttcatagatgccctttgtcaggttaaagaaaaaaccctttattagacttaggaaaacctcctctattcctggtttgtttggtttttgtaatgaaaaggtgttggattttgtcaaatgctttttctacatctgtttaggtggtcatgtagttcttttattaatttagcatattgattgattttcagatgttaaaccaatcttgcatttctggaataagccccatatctagttytgttttgttttatttttaattgcaagaccttctgatagatgattgttgctgtttattactattaaagacttcttttaaaattgatgttttagctgggcgcggtggctcacgcctgtaatcccagcactttgggaggctgaggtgggtggatcatgaggtcaggagatcgagaccgtcctggctaacacagtgaaaccccatctctactaaaaatacaaaaaaaattagccgggtgtggtggcgagcgcctgtagtcccagctactcgagaggctgaagcaggagaatgrcatgaacccagtaggcagagcttggagtgagccaagatcaagccactgcactccagcctgggtgacagagcaagactctgtctaaataaataaattaattaaattaaaaaataaataaaattgatgttttaggctaggtgtggtggctcacgcctgtaatcccagcactttgggaggccaaagtaggtggatcacctgaggtcaggagttcgagaccagcctggccaacatggtgaaaccccatctctactaaaaatacaaaaattagccgggcatagtgrcgcacacctgtaatcccagcaactcgggaggctgaggcaggagaatcgcttgaacccatgtggcaaaggttgctgtgagctgagatcacaccactgtactccagcctgggcgacagagcaagactgtgtctcaattaaaaaaaattgatatttttatcaggtattaactctgaaaatacaaaaattagccaggcgtgatggcccacacctgtaatcctagctactcgggaggctgaggcacgagaatcgcctgaacctaggaggtggaggttgcagtgagctgagattgtgacactgcactccagtctggtgacagagcgagaccctctcaaaaaaaaaaaagaaaagccgagggagagaaaccttcccatttagtctgtggcatgtgtcttcatgaattgcttaagctctcaaatgttctttcagtaatttaaactcttctgctggttttcctgggaagggtgctgtataatcacatattaatgagtctttatgtgataaccttgaacaggcacgtggaggagttcagccccagagctgtctacaccagtggtaaagcgtccagtgctgctggcttaacagcagctgttgtgagagatgaagaatctcatgagtttgtcattgaggctggagctttgatgttggctgataatgtaagaacattttacactcttcagtataaagaagtcagaatacccctaccctatcagtaaaggcctataagttaccattaaaaagatgtccttaaaaacagcattctcagctgggcrcggtggctcacacctttgtcccagtactttgggaagccgaggtgggtggatcacctgaggtcaggagttcgagaccagcctggccaacatggcgaaaacccattttctctactaaaaatacaaaaattagccgggcatggtggcgggtgcttgtggtcccagctactcaagaggctgaggtgggaggatcactgagcccaggaggtggaggctgcattgagccaagattgtgccactgcactccagcctgggtgacagagcgagactctgtctcaaaaaaaccaaaacaaaaaaaaacccagcattctttagtaaataattcatagttttcttcatctagaatttaaaattgtgatagttgatcagcatgtcctgagcacgtgtgtttgctgttactagtttagatcggtagatgtgtatataagttataggtataaaatcaatcctgagttgacacaaggttttgatgttgagtacaagtacagtaagtgtatatttttagttatgctcttagttttaagtcaattgtgtggttctttctagctttaggatctgttgaattatcttccttagaaaagggagttaagaatcttcacttacctatcttctacttgtttggagaatagaagagtccctgtggtagcagactttgtgagtttacttgtaattttccatctgaaagactgttcttgtttttcgtgatgaagtcttgctctgtcgcccaggctggagtgcagtggtgcaaccttggctcactgcaacctctgcctcccgggttcaagcaattctcctgcctcagcctcccgagtatctgggattacaggtgcacaccaccacacctggctaatttttgtattttcagtagagacggggtttcaccatgttggccaggctggtctcgaactcttgacctcatgatcagcccacctcagccttccaaagtgctgggattacaggtgtgagcccccacactcggccgttgttgttttttaagagacagggtctcactctgtcacctaacctggagtacagtggcaatcatggctcactgtaacctcaaatgcccggccttagtgaagcgttcttcctgccttggcctcccaaagtgctgggattacaagtgtgagccatgcatccagcttgaaagacagcttcttaggcttgatttgtttggttacagggtgtgtgttgtattgatgaatttgataagatggacgtgcgggatcaagttgctattcatgaagctatggaacagcagacyatatccatcactaaagcaggagtgaaggtatgtgttatctacttctgttctgctgcatcgtccatagccttgttgattaatgtagtactagagaagttcacctggataaaattcattacttcagtgtgtaatgctgttcattaaaatggaaaatacagccctgagaattatttattgaaactataaatgttgtttagagtactgtgtaaatgtattgccatgataatagaggaaaatgtccatgaacaaagcttttattttctttgataaagcatgctccaattataacaaaaataaccaaagatcaacagattgattatatatgtatatatttatttatattaacagagtatttaaatgaaaataagtatgacagtataaccaacactagggagaatctaaactttaaaagctacagattcaagtagcttttaagcagtacacaattgtaaattgaaaagacaactctttccctgcaactcccagcaacagtagatacttagaggtatctaatggataaaaaggaattttaggaggargaaaataaggcatctattgagtttgtgccccttttaggaatattttgtacataagcataatactgacaatttcattcctgctggtttaacttcataattttattttggcaatcttttaccagcacatattagatcaactttsgttttttattaatttcccatattcaattgtgtataccacagcttgattctttagactcytgttgagtgacatttggttcattttcagtgttttgtattacaaacaaaattgtagtaagcatccttgaacgcaacatccttttatatttggctataagagaaatttctaacaaattgatgtcttcaatggtgtgcacatcataccaccaaaatcacataggagttcctgtttatgtgaaaaagggtatgtcattattttggtttgtgtttagttaattatgggtgagattgaacatgttgttatatatttattggctgatgtctatttaaatctgttaagattctttcttttgtggtcaggctactctgaacgcccggacgtccattttggcagcagcaaacccaatcagtggacactatgacagatcaaaatcattgaaacagaatataaatttgtcagctcccatcatgtcccgattcgatctcttctttatccttgtggatgaatgtaatgaggtaaccccatgagcttccttttttatttccagttggagtaatygagtgagacaaggctggaagatacactgctcaacagctggtgcatgtatgtgcaccagcctttgatttccctcagggtggcacaggatcggacaaagggtttagtaagcaactcaaaataaagtcatttgaattgcctcttccacttaattgtgttcaagaattaagttttcaggttttgttactatttatttctcaaaaggaaacaagttacagttaacttccaaccacactttttatttttttaaacagcctctcactggagactgggctggagtgcagtggcacagtcttggcctactgcaacctccacttccaaggttcaagcgattcttgagtctgagcctcccaagtagctgggattacaggcatgtaacaccatgcgtggctaatttttatatttttagtacagacagggtctcaccatgttggtcaggctggtcttgaactcctggcctccagtgatgcacacccayctcagcctcccaaaatgttgggactataggtgtgagccactgtacctggccccaaccacactcttaagatttttatacaattttttgttttgttgattgggcttttattttatttttcagtcaccttgaaaaaaactgggatgccaaagaaatttcttttcttcttcttttttttaatcatgagtcatttatctttgtattttttcctatcaagttgctgaatgtattttacctttttttctcacttttaagattgagtgaaaaaatgtagatttacttggattctgatatgttagtttaattattagagttatgtgtacttaaatatttaataatgcacttcagatgcccacagaactataaaatgacagtttgtaggaactaatattttaggctgtactttttaaatcattcagcattgaggttctacattttattgggtacagtgcacagctctttgttacagtggaactttaaatattatctaaataaaagtagccttccattttgtgagtgtttggagggcttggatttttatttatttattttttaaagacaaagtcttactctgtcacccaggcagtgccacagtcatagctcactgcagcctcaatctcctgggttccagtgatcctcctgcctcagcctcccaagtagctgagactacagctctgtaccaccatgcctggttaattttttcatccttttgtagcaacggcaacaagttcaagacccgtgttggtcttgaactcttggcctcaaaccaccttaccacctcagcctcctgaatagctaagattgtaggcctgcaccatcacacctggtttggtttggtttggtttggtttggttcactttttttcccttcacaagagagacatatttaattaccagataattgagttgtctgattttcatacatttatgtttgttcatgattcattaaagtagctttagtagcagatcaagttataaacctttaaaagatcaatttataaacctttaaaacattcaagatttttttaaaactgttttctttagttttgttttgttttgtgacggagtctcactctgttgcccagactggactgcagtggcacaatcttggctcactgcaacctccgcctcctaggttcaagtgattcttctgcctcagcctcctgagtagctgggattataggcgtgtgccaccacgcctggctaattttgtgtatttttactagagacagggtttcaccatgttggccaggctggtctcaaacacctgacctcagttgatccaccgacctcagcctcccaaagtgttgggattacaggtgtgagccaccgcgcccggcttgttttgtttttgagacagggtcccactctttcctgcagtggcgtgatcatggctcactgcagcctcagcctcctgggctaacacaatcctcccacctcagcctcccgagtagctgggaccacacatgtacaccattgtgtctggctgacttttgagttttttgtagaaacaggattttgccatgttgcccaggctggctgcaaactcctgagctcaaccagtctgcccacctcagcttcccaaagtgttgggattataggcatgtgccaccatacctggccaaaaagccttttctttttctttttctttttctttttctcttttttttttttttttttttttgagatggagtctcgctctgttacccaggctggagtgcagtgctgccgtctcacctcactgcaacctccgcctctcaggttcaagtaattctcctgcctcagcctcctgagtagctgggatcacaggcgtgtgccaccatgcccggctaatttttgtatttttagtagagacggggtttcactttattggccaggctggtctcaaactcctgacctcaggtgatcccgtcttggcctcccaacgtgctgaggttacaggcgtgagccaccgggcccagcctgttttattttagttatttattttgagacagggtctggctgtattgcccaggctggagtgcagtggcatgatctcagttcactgcaacctctgcctcctgggctcaagccagcctcccacctcagcctcctgagcagctggaactacaggtgcaggcccccatgcccagctaacttttgtattttttgtagagaccragttttgccgtgttgcctggactggtcttgaactcctgagctcaagctatccaccagccttggcctctcaaagtgctaggattacaggcatgagccactgtgttccgcccagacaacttcttaattagaaataatttcaagcttacagaaaagttgcaagaaatggaatagtgcatagaacacccatataccctttacgtgattcacataataacattttaccctgtttgctttattgcttactgtctgtatatatctgcacacttttttcctgaaccatttgagagcaagttgcatattttggggtctttttttttttccagtattctgggatgaatatcttcaaaatttagtggctaagagcacagtctctgaagctagactattcaaatcctggctccactacttaactgtgaccttggataaattacttaaccttcctaggcctcaatttgcccatgtataaaatggggataatatcatttacctaataaaatttttgtgaggattgcataagttaattcttctaagacctgcctaagagaacagtgtctcatacactgagggccctataaatgttagttctgctatttttgttgttttgtttttgagataaggcttactctgttgcccaggctggagtgcagtggtgcaatcatggcttcactgccccttcaacctcctgggctcaagtgatcctcctgcctcagccacctgagtagctgggattacacatgtgcaccaccatgcccagctagtttttttgtagagacagggagggtctcagtttgtcgccctgactggtctcaaactcttgacctcaagctcttctctcacatcagtctcccaaagtgttgggattacaagtgtgagccactgcactttaccctactattgtttttaaagccaatcaattccttcaggtatagttttagagtggggcaatggtatacatttaaacgtttgattttaaatccacctgttcccaaactttcatcagaaacttggtacccattaatacttccttaagtggtatattagagcttgtttttggcgataaatcatttcttattgcctgggatagtctggagaagatattgctgtgactatcaaagtgatttttttgttttgaattaggttacagattatgccattgccaggcgcatagtagatttgcattcaagaattgaggaatcaattgatcgtgtctattccctcgatgatatcagaagatatcttctctttgcaagacagtttaaacccaaggtaacctacccttttgtactgggataaggtataatgggtatattaaagtggaatttaagtaagtgtgttatatggaaattaactgaacctgtcatctaccttagttcctaaattttacamctttttttttttttctggaacagcaatttgttttttcagagagggctgagaaagggaactgtaaaaaaaattctgaataattccattatttgtttggtggtaataaaaagatttgtatgggagaagagttttggataactggataatctagaacattcttttatttcaaacattactaagaacgttaaaattgtttatgcgcctaaatcaatagttgaatctttctttgaaggaaacattggattcatctaggccattatgataaatataaattactgttttacagtgattgatgcattgtattggactaactctgttctggacccaggattcttacctggacataaacccccaaatgcttggcattttcccaaaatagggtatgaaaaggaaaaaaaatactcattctggttgagattttcacactgttggctaacttgacttctggaaggtgttactaggtattgatcatttatcatcttcacttgattattcatgagattgcagttggctctcactgtcccaaagaaatttaatcatttaaaactaaggattatgggtgattcttgtgtaaaaaagagcatctgttctccattactgcatactgatatactgatccctctgtaaccttggcatgcttccttaatatggtgaattccttgctctgaaaagctgaggatcctttagatataaagtttattgaaacagcttttttttccctgcaaagagtgtgagttaattaattgagcctcaaatactgagcattaatttatttaatgagcactgacatcctgaggtgtaaaagacattacatcttgttccattgcttcagcttgttaagcagcttttagaaatggtcatttgcttaaatactaagccttttttcaggttcataaaattagtaacatggaattcayaagcctccttaatattagtttcttttgaaagacattacaatagtaatttattgtcactggcttctcaaagtttcaaccctctcaggttccctaaatgtttccacctggaaggctcttaaacttaggtttaccgtagctctcatcaaatagaaatgtttctctaacttgagtgatgatctgaaacagatttccaaagagtcagaggacttcattgtggagcaatataaacatctccgccagagagatggttctggagtgaccaagtcttcatggaggattacagtgcgacagcttgagagcatgattcgtctctctgaagctatggctcggatgcactgctgtgatgaggtatcagagtcactttgatatgatgagagcagagataaacagatttgttgcatgtttttaatctttggtatgggacatamtagaattcactgcaaatacatttttatgtaactgttgaatgctcatacgaccatggaattcttccctttaaagagcttggtaagcatttgagtgtagttgttagacggagacgatcacgtcatagtttatagagtgcataaagacgtaagttaccatttaatacctttcattcaggaaaaatgtacttagaccctacaatgtactagtaggcctctgcgctggcaatacagataagataatgtagyccctggcctcaaaggaactctcctccttaggttgcatttgtataatgtttgatttttagattgttctttgagccctgcattccacgaggataggtcagtgggtattaacgaggtaaaaggggagtagtacgaaagggcattcaagcgtcccatcttcgcttcaaccaaagcagccctgctttttcctagttttattaataggtttgatgtaaggtcgtctttgaaaagggggtttggcttttttttacagtgtgactgaggtataatttataaaaagggaaatgtatggcatggtgagttttttcacatacatccttgtgaatacccagctcaagatccaaaacatttccataatttcagaaagttccaaacccctgcctcttttcagtcttagccctcttcccctgaagtaactactgttccgacttcaatcactacttttatcccacaggttaattttttggcttttttccactaaattttcaaattctttgatatggtactttactattgacgaagtactttcacactaggttatttaatattctttgattcacccaatatttagggaacacctgtaggggacaaaaaatgaatgagagcccctgccttccattgctgctaatctggtgggaacgagacatgtatttaattaagcatgtaaaaaatgagaagagtgggtgatgaaataatctatatactaaatccccatgacacacagtttacctatgtaacaaacctgcatgtgtacccccgaacctaaaatataagttggaaattaaaaaaaaacgagagggagaatagagcatcacaaccagagtgctgagatgaattactttattaccaaagaaggaggaggactcagggaggtgccgacgtttaaacccagtcactgaagggtgtgcagaatttggataggcaagataccctgggacaaggtcattctaaaaccatgctaacatttgtactttttttttcattgtgatagttcctgaaatgagttgcataaaactggtacatgtcttagggcagtctctaattgatttttattttgttctatttttaaaaattagtcttcaaatagcagattcacatgatattaaaatatatgcacataaattatatacacaaatatattttctgaatgaaatttagtatctgcatatatttaagagctatttctgtctcatatgttcataatcttcatccattaaaaaaacttttgttaggcctttctcactctaagattataaaaaattctcccattatttacctagctagttttctagttgttccaaaaccatttattgaacaatccatctttttgacactggtttggcatgccttaattatatattcttgtgtgtgttaggatctccttttggactttccattctgttcattgagtcttatcagctcctcttacattggtaccatgatgttttaatctatggggctttgtagtttaaatgtagggctagttccagcgcattgttctctatcagctgttaggaacttagaaatcagcttgctctgttttaaagaaaaacctggtatttttttatcagtataacattctatttatattaacttgaagaattgaaaacatctatgatttttcctattcagtaacgtatcacttagaataggttaggttgtactactataaaatctcagctgcataaaacaatttttttttgcttgtgctacacatccattaggtcatcaagggactcaccttgtcaagttactcagagattcaggctgatataaaggtttgatcttgacatacgctttcatgatgacagaaagcagggaagagaaggtggtgagccatgtgctttctcccccttctatccagaaatgacacatactcacatttcattcgccagagaaattaacatggccmctcctaagttcaaatggatagagaaatgccttcctaccaggtgcccagaattagaagagcaaacatttgtgaacagttctgagtaccacaaataccgttatctttccacttaagtcttctgtttcactcagtagtgctttaaacttttcttcatatgtttttcagtgtttcttgttgaatttcttgatattttatcatgtttgttcgtactgggagtagcctttttttccatttcattttctggctggtttcattgctggttgtttttttgttttgttttgtttttgagatggagtctcactctgtcgcccaggctggagtgcagtggcacaatctcggctcactgcaacctctgcctcccaggttcaagcgattcttctgtctcagcctcctgagtagctgggattacaggcatgtgccaccatgcccagctaattttttatatttttagtagagatggggtttctccatgttggtcaggctggtctcaaactcccaatctcaggtgatccgcctgcctctgccttccaaagtgctgggattatagacatgagccaccgtgcctggcctagttcttatgggatgtatatgtctttggattcatatgatatgtatatatgtttatatttctacaagtacatacctaggagtggaattgttgggtcataggttaatgcatgtttttctgccaaacagttgtgtcaatttctgttttcaccgctgtgaatgagagttgttctaccttcttgacaacacttgatattgtcagtcattttagccattctggtgaatttatagtgctatttctgtgtgtgtaagagagagaatgagagagggtgtttgtgagaaaaccaaagcaacactgtgagagtgtgtgtgtttgtgagaaaaccaaaatacatactactgtgatttcattgggagaaaatctgtttggtatatcaaaaaaagtagcttaattacttcatcattattggtttaggtccaacctaaacatgtgaaggaagctttccggttactgaataaatcaatcatccgtgtggaaacacctgatgtcaatctagatcaagaggaagagatccagatggaggtagatgagggtgctggtggcatcaatggtgagatacttgttcatgtgactgttttggagttagggaccaaaacattttctgagatgtcatgtggtagaagtacacctgctgttggctaatagtctatggtagcaaaacggaaaaagcagatactgaattctattcactgtttacaagttaaaatgaaattaaatagttgatataaaatatatatacttggctgggcacggtggctctcgcctataattccagcactttgggaggctgagataggtggatcacaaggtcaggagtttgagaccaccctggccaatatggtgaaaccccttctctactaaaaatgcaaaaattagccaggcgtggtggcggctgcctgtagccccagctacctgggaggctgaggcaggagaatcacttgaacccgggaggcggaggttgcagtgagctgagattgtgccactgcactccagcctgggtgacagagcgagactctgtctcaaaaaatacatagatatttgaaagactaaaagaaaaggcagcaaaatggtgataatagacataaatcccctgggttttacccttatttgtattgttgttttgcttctgaattgaaaacattttttcaagcacattagaacagaaaaatactagaaattttatttattttgagatggggtctcattctgtcacccaggcttgaatgccttggtacactcatggcactgcagccttaacttcctgggctcaagcagtccttctccctatcctctctaatagctgggacatatgcccacgccaccactcctggctaattttttgagaattttttctagagacaggatctcgccatattgcccagactggtagaattttttattttgtatataatactgcaagtggactttcagattgtgaaatctttatatctctgatccctcacgttcctcccaagttagtttttgtctttactagtagagtttatacatttgcttctaatttatttgaaaattcttatatgctatgtataactgtatgcatgtttttttttgtttgttttttgtttttttttatttttgagatggagttttgcttttgttgcccaggctggagtacaatggtgcaatctcatctcactgcaacctttgcctcccgggttcaagcaattctcctgcctcaggcttccgagtagctgggattacaggcacccaccaccacacccagctaatttttgtatttttagtatagacaggatttcaccatgttggccaggctggtctcaaactcctgacctcaggtgatgtgcttcccttggccttgcaaagtgctgggattacaggtgtgagccactgcacctagccggtttattttgtttttcatttttattttttggcagaggagatcatgtgggaatgtatgcttgttttaaaattagtgttaaggctggatgtggtggcccacacctgtaatcccagcacttgggagaycaagacaggaggatcagttgagtccggtagttcgagaccagcctgggcagcayagcaagaccctgtctctaaaacaaataataataataatttttaaaagtgaaaaaaatcagtattaaatgtaagtagtgtatttgtaaatgcttgacaaggggatgttaagggcacaaaaataagattcaggtggtcaatttttcacttaggtcatgctgacagccctgctcctgtgaacgggatcaatggctacaatgaagacataaatcaagagtctgctcccaaagcctccttaaggctgggcttctctgagtactgccgaatctctaaccttattgtgcttcacctcagaaaggtggaagaaggtgaggcttacctggtactgcttacatgctcggtcacttctgtaagctctgttcacataggccacttgtgattgccaaacttcgtgttgttctgtcggaagagaggataagttgttrgataaactcactttagcaaagtaaatttgtggagtatcagcatacctgccagcctgaacatttcttcacaagcttattgtcaggcaaagctttgtaggtycttctttttaacattctgggcctattttaataattttgggacctgataacatatgaagcagcacatacaaatgtttttacaaatgcaaaattactattcccttacaatggttctgtttaaaacagctggacccctagggtatattttaacagtaattaattgagcctagaaatctatactatcaaaaggccattgcagactagaaatggagtaaaatcctcatstagttattggtaaagtgtggcgtctggacactagtacgcttcctacccttaactgctttamcatgctattcaaagttttatcaccctatrgttaactacaaagcagaaggaaaaatgatgaattcaagatgttgaacctaaacttctacttgatagttaagcatcagataattcttgattaaaagccccaasgatggcttgtgctggctttctggaatattttgtcatcacagtatttgctctgctatgaaagaagagaacaagagattgtagtttctgcccttgttcccctgggaactttagaccagtaggagagaaggcaacaaagtggccactaggacgcctcagcttttgtcctcattcgcgtctcacacaaaatgatttgggaactcaaggtgttcttgattcatgttatatgtcattattctctttctccctcatacaagtaagttttaaacacagcagaagttgagttttatgatagttatgttatccaggtccaaacatttcctatgtgttgagggttcttaccaggactttctaaaagtctggtagaccttggacttgttaaaagcagcaggcagttcacttagtaagatgaaccttgctaaaataaacaggtaattttttattttgagtgaatactcatgaattttacttcttagtaaactccagttccataaagccttcccctttctacagaggaaaagttgttatatttcagaatttttgcttgctgttgcttcattcctaatttatgcttttagtttctgttggcaagcattctcagaggtggtgaagcataagaagatgaagaaaagaccttcatactttgaaatcttaatagctttaagaaacatatttcttataatctmttttattaggtttctctccttatggataaaataaggcatgctttaatacaagtgatatgacttgttatttcaggcttatgctagaacattgcggaccttacgtcaccagatgtactttcggacggcttgacatttatctaatctgtacattatctcgttgtatatgtggcagagatttacccaaggactgacagtacgarttgctaggataatttgaatgtgtttttttgttgcagaagaggacgagtcagcattaaagaggagcgagcttgttaactggtacttgaaggaaatcgaatcagagatagactctgaagaagaacttataaataaaaaaagaatcatagagaaagttattcatcgactcacacactatgtaggtgcagaagtgcgcgtgctctggtatcagggagggagggagttcatgccctgtatctgcaggttcactagtgaaattttttttgacctttgtttgttttgaatcattggagtgtagtcagaagtatgagttgtaaaataagagagaatgaacagcaggtaaatgacttatttcctctgctgaaacaagcagaatttaggttaaatctcagaaggtgggattgaagtcttactagttaggtgttttaagcttctgtttcccatcctcatatttgcccttggtcgtactgctgtcacctactttctatgtttcattttcctcacattcttagttcccaccttacccaacccaatagtcaatcttccatcttacttgcttggcgaaaccccaaacttggttaaatataacttttttttttttttgtatccttatctaagcagctgaaagtatctggagaaaagcatataattatgagcccagtcttatttaaatcgatgaccagaaatctcaagtggacagttcttactgtctcatcaacctcatgacagcactgcccagtgcaattccttttcccgggtcagttctttgcctcactctctcacaggcccatcacataccttctctccactcctgtcagctggccattctcagtactcagcctgtccacagctttgtcacagttgatcactcctacaaatagtgtcttcctcacttggttctgagtcactgtatcctcctggggcttctttctcactggttattccctcttagtctctttccctgaatggttttgttttttttttttttttttgagacagagtttcgctcttgttgcccatgctggagtgcagtggcatagctcactgcagcttccacctcctgggttcaagcgattctcctgtctcagcctcccaagtaggattacaggcgccggccaccacgcccggctaattttttaattttttttttttagtagagatggggttttgccatgttggccaggctgatctagaactcctaacctcaggcgatacgctcactttggcctcccaaactgctgggattacaggcgtgagccaccgtgcctggcctgaatctttctcttcttactttactctcagatagtttacattcattacctaagtgatctcatttggttttatgaatttatccatctactgatgacttccacatttatgtcaccagctctcaccactcctgtaaactccagatgtatagagctggttgcctactgatgagcgtttaacaggcatctcgtgcttaatgtgttcaaaaacagagttgttcttccctgtttgcagttgagttgttcttactcaattgctataggccaaatgccttggaattgtctttgactccttgattccactctcccctcacagctcctcttcagcagcaaatcctctgacccccagcttcagtgtgtgtatattttcttttctctttttaccgccttcaccagcccacccaagccaccaggcatggactgttgcagaagcctcataaaattgtcctttttttgtattggcttcttgctcagcagccagataagtctttttaaaatataaatcagattattttactaccctcccttccagtgcttctctcacattagaaggaaattcagcctccttgtcatggcctgcagaactattatacagtgtaacccctgtcccctcattcacctaatttcacagcagtcttccccatacccatttcaccccagtgacactggccttgatccctaggcacaccaaatatgagggcctttgcactcaccctttgtccatttccctagatatcctcctcctctccaatgtctgctcaaatgttacctcttcaaagaaacctttcttgctagcctgccaaaatagtagccttctgctcttgctgtcaccctgccttgtatttcttcgtaatgtttaacatggcccagcagtatattctttatttaagtggttagtttgtctctcttatggaatataagctctgtgagggtagagactttgccccggagctacagtggtacctggcacatagcaggatcaaatatatgttgaatggttaaattttcctattatgtggcagagatttaactgtcgtgccaattcacagggctcactatataaatattacagaggtcatgtattggggttgtgtcttctcaaaaaccgttttcctgtgaaggtagatcagtctgtgattattgaggggtagggaggtgtaagaacagctactcagatcagggtccagagttgcttttctagtggtgggacatgtctgtgtgctccttgggatcagtgtaaagtaaaacgacccaggcaaggaatctgcttcaggactttggaacacactgtgaagctaactgatctaaacttgaattacctatttatttatttatttatttatttatcttttgagagagtcttgctctgttgcccagactggagtgcagtagcatgatctcagctcgccgcaacttccgccttctgggtttaaatgattctcttatctcagcctccagagtagctgggattacaggtgcccgccaccactcccagctaatttttgtatttttagtagagatggtgtttcaccatgttggccaggctggtctcaaactcctgacctcaggtgatccacccacctcagcctcccaaagtgctgggattacaggcatgagctactgcgctcagcctggattaccttttaaaatttggcttaccacctgaactaatttgctacagaaaactagagagcttatactgtgctgatgagatatgatgcttcctatgaaggtatgttaacacatagagtgagtgcttgaaagtgtccaatctaacttcaggggtagatttgaaagggcaatttttwaaaaagtgtccagtcccccttagtggcttcagtgtttatactgtggagccttgccagacttcttaggatcaaatcacagtttcctgagttcctttctatgggcttggctaggagctcttctcatttgtggacagttttgactaacctgtaattatatcgtgggcttaaaatctgtcatcaagattttaagccagatggcatgttctmcctttttttttattagctcagagtgaaaaatttttcagatgaattttcatagattcttctcctaactctatgaaatggtggtatatgaaaaagttcagtggtcagtaattaaaaattgctgaatgatattaagtatgaaacagacttccaattaattagaagattttgcagagttgtttaaccttaaaattcaagcattacttccttttttgaagttgtatttacaagcatttgatgtaatatatttaagtatttcttaattttccacaaggggtttatggtatgaaaaggtcagcatcctactaggaacagggtttagcagagcactgatagtgatttttaaagtgtggtccttttcctaggagtttctagttgggaaatgaaagaaaatgttgatagcaaacactcggaagaagggtcaagtcttgtatatctggacattggtataatactgcttgaaacctgaggacaaatatttgtgtttcacaggatcatgttctaattgagctcacccaggctggattgaaaggctccacagagggaagtgagagctatgaagaagatccctacttggtagttaacmctaactacttgctcgaagattgagatagtgaaagtaactgaccagagctgaggaactgtggcacagcaccycgtggcctggagcctggctggagctctgctagggacagaartgtttctggaagtgatgcttccaggatttgttttcagaaacaagaattgagttgatggtcctatgtgtcacattcatcacaggtttcataccaacacaggcttcagcacttcctttggtgtgtttcctgtcccagtgaagttggaaccaaataatgtgtagtctctataaccaatacctttgttttcatgtgtaagaaaaggcccattacttttaaggtatgtgctgtcctmttgagcaaataactttttttcaattgccagctwctgcttttattcatcaaaataaaataacttgttctgaagttgtctattggrtttctttctactgtaccctgattattacttccatctacttctgaatgtgagactttccctttttgcttaacctggagtgaagaggtakaactgtggtattatggatgaggtttctatgagaaggagtcattagagaactcatatgaaagctagaggccttagagatgactttccaaggttaattccagttgtttttttttttttttaagtttataaaagtttattatacttttttaaaattactctttagtaatttattttacttctgtgtcctaagggtaatttctcaggattgttttcaaattgcttttttaggggaaataggtcatttgctatattacaagcaatccccaaattttatggtcttccaggaaaagttattaccgtttatgatactaacagttcctgagacttagctatgatcagtatgttcatgaggtggagcagttcctgtgttgcagcttttaacaacasatggcattcattaaatcacaaagtatgttaaaggtcacaaaagcaaaataactgtctgaggctaaggcccacgtgggacagtctaatacccatgagtactcaacttgccttgatgtctgagctttccagtgcaatgtgaatttgagcagccagaaatctattagtagaaagcaagacagattaatataggttaaaacaatgatttaaatatgtttctcccaataattatctctttccctggaatcaacttgtatgaaaccttgtcaaaatgtactccacaagtatgtacaattaagtattttaaaaataaatggcaaacattaaaaacaagagtgaatactcaagtagatttgtcatgggatttttataagaagactggtatcaggtaatgtatctttaaagactaggctgctctgctgacgtagtaaccattttttattcctttactttcctaatagccttgctttcacttaagaaaaaaaaaggctaggcacggtggctcacgcctgtaatcccagcactttgggaggccaaggtgagtagatcacctgaggtcaggagttcgagacaagcctggccaacgtggagaaaacctgtctctactaaaagtacaaaaattagccaggcatggtggtgggcacctgtaatcccagctactcaggaggttgaggcaggagaattgcttgaacccaagaggtggaagttgcagtgagctgagatcatgccactgccctccagcttgggcggcaacaacaacaacaaaaaaagattcccaggcttcaccctctacagtctatggaaagtcatgggagtctattaaaaaaaaacagacactataaaccaaattaaaagatgggaaaatttttctatcacgttttaatatgtgatatccaaactcccattaagaatttttatatcagtaataagataaaactcagaagaaaaatgcccaattaacaagaagagcttcacctcttaaataatcagaaaaagaaaagcacataatatttacgtcaaagtatcaaaaatgtaaaagttttataataggcattagcaaggcagacggatacaggcacacatctaactctatgtaggatttaacttggaagacaatttgcatttcaatcaatcaaaaaccatttttttttttttgagatgatctccctgtgttgcccagactggcctcaagctcctgggcttgagcagtcctacagtctgagcctccaaaagtactggcaaaacaggcgtgattgaccatgcccagcctgtatataaggatattcatttgcagcattgtttgcaacacaaaaatgtaaaaccaaccggtgtttaatatgcaagatgttaatttatggtacattcttgctgtggaaagctatgcatctgttagaggtgggtctatatgttctgatacaggcagaactctaagagctattaagtgaagaaaaggctgaaaatacatatggcataattccatatatgttaaattgttctatattttaaatgttatacacgtttccatttgtatttacgtaataataatgatccctgagctgtactgttgtatacatgctacaagaaagacccatttaatccccacagcctatgatgaattatccacattctacaggtgacaaaatagaggcacaaagttaagtaatttttgtcaggtgagatttaaacccaggcattctgactcctgtataaccattaagatatgcagagaaagaaaactggaaagatacatattgctgaagatacttattataggaagaggaggggggagggtgaaggaatttgcaagtttttcatagatgtttccatattgtttgaatctcttacaaaatatgttcagcatatttttaaagagaaaatttggggcaaaatacttatttttgtattatgtaaacaaattttaaaataatgtgtggctgggtgcgctggctcacacctgtaatcccaacactttaggaggctgaggcaagaggattgcttgagcccaggagttcaagaccagcctgggtgacatggcaaaactccatctctactaaaaatacaaaaaattagccagtcgtggtggcgcacacctatggtcccacctacccaggatgctgagatgggaggatcacttgagcccaggaagtcaaggctgcaggaagctgtgatcgcaccactgcactcccacctgggcaacagagtgagacccggtcaccaaaaaacaaaaaaaaacaaaaaaaattggtaatcgttttcttcagacattttccgggttcctctgcttaacttgtataggaagtctgaggtttttgtgttggtctttaccttttttttttttttttttttttaagatggagtctcattctgttgcccaggctggagtgcagtggcatgatcttggctcctgcaacctccgcctcctgggttcaagtgattctcctgcctcagcctcctgagtagccgggactacaggcgcatgccacgatgcctggctaattttttgtatttttagtagagatggggtttcaccatgttagctaggacggtctcgatctcctgacctcgtgatccgcccacctcggcctcccaaagtgctggaattacaggtgtgagccaccacgcccggccctgatctttacatttttaaatattgcattagtgaaccgtgtactgattttgtgatcatagataacccagttaaatattaagtcttaattatcacttagtattttacaacctcagttgcagttataaagtaagggttccacatacctcctaacagttcctagaaaatggagctgtcttggcatgtagtctttattgccctgctaagtttttcatgctgggggtcagactgggagtctgatagaaatttcatttccaccgctggtcctctaaccaatgacttgctgcacaacctgagtggtctcctgggagaccagagttctaactttgtagcaggggacaaagacatgtatgtttgtcaccagccactgcccactttcctgccagaatacttcagcagtctccatgccagtcagatcacccattataaggtatttctgtcatgggcacagctcctcccagcaggargcacccagaatccagaygagaaaacagtgcagtgctaccggcgactcctcaaggccctcaagactgcacggcttcagcccatggtcatcctgcaccaccagaccctccctgccagcaccctccggagaaccgaagcctttgctgacctcttcgccgactatgccacattcgccttccactccttcggggacctagttgggatctggttcaccttcagtgacttggaggaagtgatcaaggagcttccccaccaggaatcaagagcgtyacaactccagacyctcagtgatgcccacagaaaagcctatgagatttaccacgaaagctatgcttttcagggtgagtacacattgacctgatggtgacccctcggcaaccttcatcacacaccttccccatcctccttagagcagattcgacatttctcccaactcaccttcagcagtcctcttatgtctgtgcatagggagaaattaatattgtaaattgatttcccactggcgataggaaggggtagctaacatggcaaaacactcagcatttcctttgaaaaatatctttgaggctcacgcctgtaatcctagcactttgggaggccgaggtgggcggatcacttgaagtcaggagttcgagaccagcctggccaatatggcaaaaccccgtctctactaaaaataccaaaattagccagggatggtagcaggcgcctgtgatcccagctactcgggaggcttaggcaggagaattgcttgaacccaggaggcagatgttgcagtgagccgaaatcatgccactgtactacagcctgtgcgacagagcaagacacaatctcaaaaaaaaaaaatatgtatatatatatatatatatatatatacacacatgtatctttgaaataccccttgcccagtcttgagttgtgcaagcactgattgtctttctgtcttcctttccgtctatgtcctgctaccctgacttggaggcaaagtttcgtggtttcctgtccttccccctcggctcccctatacttacatgtcttagttggagcttacattgcagcttgggagacagacaaatacaagatgaaacaattatatatcacaggatgaggagagcacaactgtaactgttcacattcctgcctcctaggggacttgaagttctgatctgtaggcctaggctgaaccaggacatttgtgattataatcaattccctaagtgtatgttaggtacaccaattttgagaatcaattttggattatatatgctttcttgtttttattatataccatatacatacatatttgtatatatagtacctgatatatatatatatatatatatatatatatatatatatatatatatacttctatgttctactttttcattttaacatagtttatgactatattctcattttattaaaaacttgagccaggcatggtggctcatgcctataatcccagcacgttaggaggccaaggcagggggattgcttgaggccaggagttggagaccagcctgggcaacatagagagccactatctctaaaataatataataatttactccagtgctggaatagtattgcttaaaacaaaagaaaaacttgaaagcataactttcaatggtcttttaggttcccattgtataaatggagcataaagtttaaggtattttccttatttttgtatgtttattctaattttcactagttacaagttatgttgcaatgacattcctatctataaactatttcccaccttctgataaattctttctgacagaatcttagaattgaaactactaggtgaaaagatctgcattctttaagattttaaagcatggtactaaattattttccagaaaagttgtaatcatttatacgaacagttataaaattactctctgaccccattctgtcagtttcaaatgctatattttattactaatttgacagctgaaaacagcttattttcatgtcttgttaatttgcatgtatttgattatagagacgttaaacatttttttcttcttctttttttttttttttttttttttttgagatggagtctcactcttttgtccaggctggagtgcagtggtgtgatctcggctcactgcaacctctgcctcccgagttcaagcaattctcctgcctcagccttcccagtagctgggattacaggcacgcaccaccacatctggctaatttttgtatttttagtagagatggggtttcaccgtgttggccaggctggactcaaacttctgatctcaggtgatccgcccgcctcggactcccaaaatgctgggattacaggcgtgagccaccacgcccggccttaaacaaaaaaataaaataaggccaggcgtggtggttcacgcttgtaatcccagcactttgggaggctgaggcaggcgggtcacaaggtcagaagatcgagaccatcctggctaacacggtgaaaccccatctctactaaaaatacaaaaaattagcgaggcgtggtagcacgtgtctgtagtcccagctactcaggaggctgaggcaggagaatcgcttgaacctgggaggcggaggttgcagtgagccgagactgcgccattgcactccagcctgggcgacagagcgagactctgtctcaaaaataaatgaaaaataaactaggacatcatagctgccttattcacaatagccaaaaggtggaagcaacccagatatccactgatggatgaatggataaacgagacgtggcatagacataaaatggaatattactccacatttattaaaaagggaagaaatcatcacatgctacaacatggatgaaccttgaggacattatgctatgtgaaataagccagacacaaaaagacaaacgctgtatgattccatgtataggaggaaactagagcagtcgaattcatggagagaggaaggagaatggcagaggccaggggctggggtaggggagaaatggagagctctttaatgggagtagaatttctgttcagaaaaatgaaaaagttctggagattggtt

SEQ ID NO: 95285 - DNA, 28787 bp, Homo sapiens
aaccaccccccaggaggcaggacctgtggtgtcctctgcaggccaaactctccagatgcgggagttctgtgtactggtattacacattatctgtccagcccactgagcttctgcaggattcctcagaggtgaggcctcagggacagccctggcgtctctctcctgaccttaccacctccgatgtctgcctgtggagatgtgtacccactctggcctgctcatccccacctgccagcagggaacacgccagaagggcctccagccttcttggcagtagccagggctgcagaaagggctgccttggggtccagcaggtggtgagcccgtgtgggcaagagggagtgaggactaggggtgacgatgtgtgagaggtgagtgggcgggaggcaggatagggggagccttgcctggaggccagtgggggtactgaaggaccctggtgatgggaagggtttatcagacaaggagcacacttcctgagggtggaaggtttcttcctgacttttccttcctgctacctggctgctcgagggccagggccctagtggcttcatattgttttaggacatgtcacggagtggctccctgggcacagacactgtccctcctttccttccctgccagtttgggcacctgcccacagtgtttgggagcaggggctgtctcctgggcctctgcctgcaccttgccacattctgagctggatcacagatstggctcggaactgcccggcccatggctgaggcttttgtgggcaggggcagaggagggagctcagccctgcacggagcctgccttccctgggccagcctcccttgccatggaaacagccccacggaggcccgggaattacccgggatgggaattttaattgcagcccacggtcctgttgtgcagtccgcccccaactcccatcacctccccaaccccaggccctgtgagatattcactgtgtcatatttgtagatcagattcagggtcgggggcctgtctttggccttgtttgcttttggtcagtctgtctcctcatggccctgtggctgggtgtctcaggacgtagcctggtgccaggtgtgttggggtgggcagtgggaggtggggaccttcctaagatgaacatgggcctatggccagcactgcacttccactgcaggaaggctctagtggggaaccgggggaagcactgggtgatgagagcactcactgtggctctcgggccacaggggagagtatggcaatggccagcagagtaggttaaggaaggtcagcatctgtgctggatcccttcctcaaaggctagctggagcaggctccttcctcagaaggaagggacatctggcttcctctgatcttttcttcctcccaagacctttggtcttggaagagactcaccttggcaagctctggactggacccatgaggccagaggaaggaagacgaaactcccagagtgtggagcctcctttgatgagctgaggatcaaatctcccccagcacagaccactccctgccttcccacctaccagtcccaggagggccaagaaccctggggtggctggggcagtttgggcagcaggtgtattgtgcaggggacggggtcacaagataggggttcaaatcctggcgtggctacttccaagcccttagtttctgttttccctcgccaggatttgctggaatcctctaatttatctgggggatttggtcctgtaactgggaaaggaggagcactttctgtggctccaagaataaacagggaagggtgcccttctccctggcctctcagcctggatttgaggctggggttagaagttgcagccaaagccagataggctgtttgcagagaggccttgggacactgtggcaatgcttttgggggccctggagcccaagggcctctgtgttggggaagatgccattctccctgcttctggtggcctcagcctggagctatgggagcatcagggcttgtcccttggcctgaacattagctccccaacaagggacataatgagggaagcctggtgaggctaggatgaggcactcctttaagtagctgctttgcctctggcagtttcttagagcaggaacggagaacatgctagaggtgaatgcaggtgacaggttggtctgggagtaacttaatgtccctttgagggatttacagaaacccttctaggtgaagtagcttttcaaggggctttggctggaggacctggtggggcaggaaaggggtttcagtgagatgcggtgttccgaatccatgagctggcaaagcctggcaacctcagacccattgacccatggggatggtaagaggaggaaatgggatcatatgcacagtggctggcagaagtaaggcccccacctttttgttttatttcaacaacaaagaggttgattcatccagaagaggaattcatccagaacagggcagaagtgggggataggaggcaagtaagagggcttttcctgaaaaaggagacgcagttggaggctcaattcacttctgcatggccttgggtaagtcacgcaacttctctgggcctcagtttgcccagctgtgagatacgggagttggttcagctcacctctggggcccctccggctctattatgaatgggtttccacatcacctgcrggaaaggtctgctgggcctgtctgtttttgcccaggtttttctggttggaactttttctgcaggtgctgtgggctcttgggcctggagtctgggcacagctaagccgtcttccgtgtgcttgctgccttgtcactgtcccccatgagacatgggaaattgaggatcgccgcggcagatcttaaatcagagcctgggccatccatctcccagaacagactgaaataacaaggtgggtggcacagatcgcctccacatggacagttgaaagatattaaaaagccagaatcttgagccccccagatcccttaacaaatttccaaatacctcagggacctgcatgcagacgagagaagagggaatatctcattttagagttccctaggaaggccagagggctgcatttcaggaaatgcctctgtctgagggcttctgaaggccctgccacctgccattggcctccctagactgcctgacctccagctcctccctgcaggtgcccccactagagtcagcctggccagagtggcagagcagagtgcccaggtacgtggaagccagactgctgtggcgcgctgttgctcaccagctctgtaaatttgggaaagttgcttaaacttttcagctctcagtttcctcatctgtaaaacgggaatgacattggttacttcaaggggttattttgagagttaaataaaataattcacacaaagccaacagcacagtgcctggcccatcttgagacctcaaacattagccactaatattaatctccctcctgtcccataaatgagcccacccagctgctgtttcctttcacaggctctcctgctcttctgcctttttacattccaaccatctcttaagcctcagttcaactctctcctcctccargaagcyctccctgaatggccctccaagggtccacctccctctgacttccaaggctaaatttttttgtatttgattgtatttgtagtgacttttctttgctgcttcattgtgtaggatccaaactccttgagcacaagccctttgcttctgtttccccctcccccttttccccwcggcacctgtcacagtgcaatccacaccataggcactcctaaaacacccatgtttgtcaagtgggggattccaggaaaygggagacagaatcctagtgtttctgagagcgggtcttttgtctatttttagagtttaaatgttcttcaaaaatttcccaaattccactctgtctttacattacaaccacaccaatcttttcatgtcagccagatgtacttttccctcctctctacccgaaatacaccagaatttgaaaaatgaggcgctggatctggtagtgcaagatagagaaagctttctctaaaccctgactattctcgtcagcctgaaaacttggggagggattaactctgggtgaaaaggaaggttctgatggctcagcccaaggctattagagcttggttttttatagagggacagtcacgatttggaaacatgaagtcttagcttttggaaggtcagcaccactcttgttaggcatctcagtacgctgccactccctgggygggggtggggagggggaaggcaggtggagaaacagacttggtagccttggagtcaggactgaggactgactctgccatcccaggtgctgtggctacaggaatgcgcactggaaggtgctgttagcccctccagcttgatgggggtggagatgggggagaggagtttatagttatgagtttgcaattgtgaccaagataaatgaccatttggtctagtgggacccttggggcaagggccttcataccatctgctctgggtggagagagggagaccttcttgatgacccgagagcccagtcctccagggaagtgcagctgtcatgttctcctcttggcgagtgagtgaatgtttgttcctggctaccctgaacgcaacaatgtgcaattattaagtactcacccccttgccagacactgctgaatgctctacacacattaccatccagtgttcacaacacccctacagggtgaggatcagtacctctgtcttctggatgaggaaactgagccgcagagaggctgatcactcacacaaagtcacccagcaaacacacagcaggttcctctgacccaggaaactgctgtgctaaccattctgctgtgcttcactgtgtgggatggaggcagcagctgcttgcccatacatcggggacgaggctttcccagaatgcctggagttttcaagccatccactgctctctgcgccccagtccaggagtgatggagagctatagtcgggaatcagagattccaggtggagatgaaggctgactgttcctctgcttcagaaataaccatttggtcagaactgaggagcatcagaggttcagccagacaaagcaccttcctagtctccagatgaggaaacaggccactggggtgggcagcctcagtcatgtcagatgtggtggcagagctgggactcctggccgtcctctccagcccaggggccactgatcacatgatattgctctgctcatgcaccctgcttctcctccactccactctgagaggttcatcaaccagtccctggtgcccatgaaggccaggcctgtggaagatgctcagtcaatatttgtgcagaggatacaggcccaaggtgctcggctggccagctctgtccccatccctcatccataaaagcagtggtggctccagattgccacctagaaagccaggggcagtctggtaggaagaaggtgggcagtgtggaggagcggcctagaagacggtcagccagcaaacccactctaaggtcccattaagacaccccctgaccctgcccaagagggacaactgcagcggggacaaatgattcatccccacacttgagaagcagaggggcggggaaggaggaaaggctaggggtgtgtgtcagggtattgcacacagagatggttggcttcagttctgggttctgaagtccctctgtgccgctggctgggcaagaggtaaaggacagctgggccaggggccaggctgggactccagcaggacttccgcggcgaggggcgctgggggggcgaaaggctttggcggcccggccagcagcgccctcgggggtaaggggaagggaggctacgcggagaggtgccagagacagccggtgcccttgcccgccggccgcccgaagtccgggtggtgggcgtggctgcccccggcgggtgggtgggggcgggctccggagcctggctgcggagtgggtgtccagggcgctcgcggctggggcggcgcggggggcgggaaggcgcgcgccgaaggggtggggaggagaaggggcgggcggctcgggggtggagccgggaccgcagcgcctgccgctcgctcggagctgtagccgccgctgccgccgctgctcttggctcggggacgcgggcgggcgctccgagaggctctggtgcctgcggctgctgctctcctccggcgcccggggctgcggcgctccgggtcccggcccctgtcccggcatctctcgggtccctgagccccggccccgggtcccgcgtccggccggagagaacgcactcagctgctcgagccgccccgggctcgcgcccccgggccatgaagaggggcccgtgaggcgcgcgcggagtcggaggaagaggagggaggagggaggccgaggaggagggcgcgggaggcggaggatgccgccgcggctgctgccgccgccgccacccgcgggtccccggcgaccctgactccagacccgaggatggagccggcgctgggcgctgcagctgctcccggcgcgtccccgaccaggtattggccgggccccgcgggctccggggcgggcgggagcggacactccgccgcagcagccgggaggggcgcgggcgcggtgggagacgcccctccgctcggggacagcagctaccggcggtgagcggaggggtggcggcggcgaggaacggcggcgtgttgggcgcaggaaggggctgccggggctggtggccggtgagcgccgcgatcacctcagccctccctgcccccattcgaggagggcagcaaacttgagacgcgcggtggcccccgaggcgcttggctcccctccgctgcggagcgcactcaggggctgctccgggctcaccgtcccacgacccgcctggctcgggtctgcggaggcgccttgagaccctgaggtccccgcgcccgcaccaactttccaaacccagctgcacccggaggcgggggcgccgctcccygcttcctgctcccagccctggcccggcctccgcacccagaccgctgcgatgagctgggcccctgtggggccggagccgccggatggtgcagagcccaccacggaaagccggaacaaccctcccgctcttctctgggtaggacccggggatcagcccctcccaggctccagggacccagtgctggctttcgcggtaacagcccagagtaaccctagctgggatgctgggcgttaaaaggccaggctgcctgaggaaggtaagacccgggggtcgtcctggagtggcaccttggcctgatttcaggtgtgccccctcccccaccccgggcctgccctttcacaggactgccttcctcagctctggggccggcttcctcttrgtggacttaaaactgctcttcggcagcggactccctaggaagggccactcctagggtccaggtgcccgaagacgggcttgggccggccattgacagggagctggaggctggggcaggggaggtggctgtccagtcaaggacagaaattcagtccagcaacttctggaggggtgggaggagctgggggcaggcttgggcgcaggagtcaggcaccctggctgggaggaagctgctttgaccagcacagggacgtcagaggcaagcaggtgggaacgagtgggccaggtgtctacctccagaggttcctcagccccttgcagtggggcctgctgtctcaggcagagaccttacctgggcaggcagttcccaggctcctgtcctcagcagtggggacacttccaggcatcatgatgaccctgtttctttttcaaagtgctttcatcgtcatgactcacacatcacattcaccagggaggtatcaggcttccaacctattcaattcccctccctaccgggtctttagggagctgctggggaaaggaatgggtggatttgcccttgagccttgaacccctgcaggaggccaggagcctggcatggcacctttgattttcctgttgccagtccctcatcctggcggtgagcagccctaggccaggatgcttcacagtgatggggtggggaggggaggggcaccagggagagcaagtctctgctaatcatcccccaaactctgctgggtcttcaaaatcatggccaggtgccacccccagcccccttcactcaacacccggcttccccatctcaaagcagaaacgcattttccctaaaatccaaatctccctctttgctgagtagttgcaatgcttttggccaggggtttcctccccaacatccaaagtcaagcttccctctgtcctggcccctgagccatctctgtgagtcacaggcccctgctgggagagggatgtatccccctgaccactctccccccaacccttgccgacagggccctagctcctgggcaagggtggtgctgacgacactgatagaggggtgtgtgtcaggccgcatcggaggaggagtacctctgtgttccactgagtctgcaggaggggctcaagtgccaggtcctccctgggggccaggttcatgccctactagattccccttgcctacccctctgtctccctcccttgcccgctgtggatctctctttactttcccaactccactctgcattggtgcggggagggagcatttgatattcataatctggttcagagaaggtcccgaagccctgagtcactgtatggtttccatggaaacagacttgttcagaggactcagtgtagcggctgtggtgggggagaagggaaacatatagtaaaaccaggctccacaagtgtggcgggacttrgaccaactcccttcggtggggactgtgaggggtgggcaaggctctggcctccctgtcggaggggctgtctctccccacccactggggtcctgccattggatgccgctcagctgctgctgtgactcttggcaggctgctgcttctcccacggaccttctggctaggtgcccgggctcatggctacctctccctgcctcagttttcccctctgtaaatggagaaaataacaccracctgatagcattgttgtgaaggtcaaatgcagtaatatatgagacacacttagaatggtgccatagtaagtgttccaaagcatcattcctaggaattaagtcaggacattggaagaaactccccaagcatgctcamctagatccttaccctaggtcccagcaggtggtcctgacatcttgctgggctggcctcctgctttgaaacagcctctccccagcggccccggcacaccccccgctgggaagcagccagccatttttttctacggagcatttgtttcaggttcctgagggcctggcrcagtgctaggcagccctgggttttgttcagaccctacctgtctaggagccttgtgggagtaaatccagatggacaggcagctycctgcctcagccttcccgctaaaggsaggggtcagccctggagcccctaggggttgaggcagatggagaggagcagaagaggtccaggcagagatggtggccctctgtgacagagtaaaggggttggggtggggcaggccactgtccctgatcctagagaggctggttcatctggctggagaagcatctgtcttcctcttgatcagccagagagggacagggagctcttcagaaaggtaacagatcctgcacactctcctaaccccaagttagaacctctagtgctcaattgttcccagcatgccctgagagtctggacaggcttggggctccagcctgagcagctgctgatctgttattgtcctgcctgctggggcagggtgaggggctccccgccccagtgcctgcctcagcagcattgaggagtgcagctaggggagattctgagtgccactgatgccttacccggtctcccttaccggcccttctctctcactgcagccctcccctccatggccctcaggttccctgctccttggcagggctccctcctcccctcctggaagatgggcttcagctccaggctccttaaagacatcccatgcccatcacaaccagctgtcagagctgcaaagcctgctctttagctgccgacccttctctttcacagatgggaaaacagatttctggggtttgcttgtatggccagagcccaagctagttgtagcctctctcagctacacaccagccctggggatgcccttcccttcttgctggctctccaagcagccccagctgctgccggcacccccatggacaccccttgccagctctccggttcctgccaaggttctacccccggcaggtctctctggactgttttgctgtcctcattggtgttcacaacaccttccaatttaatatcctctgcaaatttcattaacggactgtttactccctctctcaggatcattaatgaagatgttagataagatctgacccaatgctgaggcttggcagccctgcccccactcccagasttgcgsccctccagccccttcctctgggcttgccttctccacccggggcccttgggacctgccccctcctgctattatgccccatgacaagtgctwagggccaagtctgtttgaattaattttgtaagattactcgaggcgctgtatcaaatgctttgctaaaaatcaagatatattaccctgcctgcgtttccttcatctacccgtcttgtaattctatcaagaaagctatcaagtttgtcaggcatgatttgttctttataaatccccacggtgccacatgggggcacagggttcccgcgttttctaaatgtttagagattccctctttgtgtttgctccttgattagagctggaaggcggtgggctgggaattgtcaggaatgctgtctccttctcagggatggggaagaaggcgtggcttcttttctcccaagtttctgccagtgtcagtgagttgtttaggactcactgagtccctgcagtgtgtggggggccccaagctgggcacttggggaggagggataggatagagctaggggaggagatggaggggggctggtgctgtccttcaaggattctgcagggcaggtgaaacagacagacgagcctgctgcagacattctgaaggtaccactgattgagagattactgtgtgccagtcactatgctaacagctttatatgccagatgccatttaagcccctctcctgccctgggagaggagtgtgacctcccttcacctgagtacctgagaatcagaaagtgttaaggctgcccaggactcaaggtctgggtttcaccctctgtttatgctgttatgctgctcctagccatttaagacacacaaaaagggtcaacaaagctgaatggagtaatttggacattttaggaggtcagagtggggatggaagggaagcctgtagggaaagctttggagaggtgaggacctcactcgcatatgaacctcacatacaacccccacagcctgaaatccgttcgttctcttcctgccacttctgagttgcatgaacaaatctcttaacttctctgagcctcagtccctcacctgtgaaattgattcrgctgtagttcttacccctaggcatgtggagaggattcaatgaggtgaggcgtgaaagggtcataccatggtgctaggccgccactgtatatgagcagccgccattgtgttctacaatggaggtccctgttgatggcaggcagagacactcatctggttggccatatgcccagtggatggagctgtggcccctcctaatgctcttcacccagcagaagaggggtgacagggtgagcctcactggcatcctggcccaggggcatccttgggaccagctgtgggctggtgataagctttgggcttagagcagggaagcctcaactgggcagagagcccaaacccgatgccccattccagactgtttcaggccagatggtaataaagacattctttggtgtctttttggtggcataggatttgggcattcctgggctccctggtcataaaaccactcaaagttctcactgcttggctagcccagacccagagtcactgtgtggggagcacagtgtgtttggacttctgcccatcaggtgcagcagtcccatgtccacacccacttgggatcattttcattcttgtcgttcagctggggagggaaaaccctctgggaagcggtgagatggcacacacctattggtatgccaggggaaccaaccaggaagggcagcattggcagccctcaagccccaccagtggatgccccagggacctgaccctgggggatggccagtaggtatcagatgcaccagtatctgggtcgggggtgaatgctgtgatcgagatcggcaccaatgtgtcctgggaccctggtggcaaccttggccccggtgctccctctccctccctctagctgggtgatgctcttgggtgtggcctgggggttttagctctgtgattagggccagggcttgggattctttagagccgagtctgaatcctagcgccaccacagactagctgtgcgtgcttgaacaagttcccacacttgctgagcctcgctgctcctcgtctgtgaaaggtggcagtagcccctggcctgtgggatgcatcccctgacagaagccaggtctgtgatcatctctgagtatccacgtcggcagcctcctccatcccatgtgacagtctcaaggctctgggtcctattcattctccacccccagtcctcgtccccacggggccagccaggcttaatgtgcaggtggcccaggctggagactcctggatccagagacaggcgggcccctctcccagcctggccggcagcagctgcctgagttccagctcctgttgatgtttcccatccttgaagctgggaggatgggccggagccccggtgtccagggggtggggcctcggtactattccaactctggctgtggcttctcggtggggcgggggacaggaaaccggggcttttccgcccagtgtcggggctgtagagtcccgcctaccgcargccaggctgtaccaggactggcctgagacagggaaccgggaccttctgactcatccctcccccagaggagctgggyacactggggccttgtgttgtggccaggaggtcagtcactctccccactgctggggaaaactttcccctcaggtcgggcctgggaccacccccctcccactcccaccctccacggcaggatgtgaggtgccttccttaccccagacaaggtctctgcagccacaacagtcagggtctccaaccacgcaggctgctggcgcttcagtggagcaggctatggcatctgttttaacttttaaaaacatttccaggccaatggtgcccctctgtgcatttagtagtccataaaaatcatggtcatggctcttaataagcatttgctctgtgcctagcactgtgttaagctgtgggcatccatcggccttctgtctcactgcccaaatattagaaagattctgtgattgtttctcccatttcctacataaggacaagtgaggcctatagaggttaagagcctcacgcaaggcctcatagctataaggcaacagcagttggattcaaatccaggcctctgtggccccacagctggggtgcctaactacccctccgactgcctccctgaatgcttgtgggtaccttctccaggaggcttgagacatccatgggtatcatgtggacattggagtgctctgccctggagacaccagagctcataagaggcagctgggcagccctgctgatggtgaaaaatcggtagaccaattgctctccaggtgcttgtcttggaaaccatgactgtgagagcttgtccctactggaggtgctcagaaaatgtagtggttctgcctgtggggcccagggattctagggattgttcgcaagtaccatgtttgtggtggtccaggttctggagagagggtccatagacctcacagtgtttcaagttgaggtgggcatgaccccaaagagaaggggtcccttgggctgacctagaccacagaggccgagtctggaccccagcagctcacccctctggaaggttgcactggttggattgtrtgttggcatactgcycacatggaaggatgctctargacactgtcccatgaaactcgtctttggatttcttargtacaaagtcttgaggacgagttcatggtggcacacgcacagagctctgtaagagctcccttgggagaaatcttgcactggattcagtgtcaggaatagctggacatctcttgagtggatgctttaatctttatctcatgggtcctgtgaaacaagtaaatgaaatatttcccttttcctattggctagctcagtagcccacacatggtgtgactcttgtacactgacttggcctctggttgtttcagactcttatacccttgttttccccttgccttgccttcattttcatcacctcattttccttaggaagaaaaacrccttgctgttttatgcattttagccttaactaaaacattcatgggggattastgctggctacgtcagagtcagggagtaagcatttcccctctgcagtctccatcctagaggcctgttcgccagctcctccctccctgtcccattcccttgtcccttgctccagttcttgggaccccagagccttgggaccccattcatcatggctcctgagtttgtccggaaagacgatgttcaggttcttgccctgccctcactgtgctgcttcttcatcccccagggcttcacagtagttttttagggagaaatgtctgggagaagagtcatttccccatcccagggctcagctgctcccatagccacaggccccctctgaaatccagctttatttcagctccgtccctgtatctcagcagtccccagctgcctactgtccttagtggcccacctgagcagacaaagcccatttctggcggaaaagcagtgcctttgaccctggtgccttggaaatgggggtggggagagctggctggcagtgcctggggggggagggtgggaggcacagtgagatgccagggctgattttcagtaccgcaccctgtcatcaatcacccctctacttcctacatggagtggcttcactgtgtcccccaaaattaataaactcaaactgaatcaaaaagctcagtgtaaacggtgtctcctcccaccctagtctcctcgaggccccctccctctgggacatctcccgttactagctcagagcaagctctttcagtgattgtttatgcatatatacaaatatacatgtccacctccttaaacaaatctgaaaaggtggtgtactattacacacatgttttctggctctagcttttgaaacttatatatgctgggtgactgtttctatcagtacgttcatgtctgaggaggcttctctgatatagtcggttggaaagacaattccctggacatgttaataatgaaggggttaagcttctaggaaagagtggggtgcccaagcttgggctttcagaggttcgggaaacttctcaattgtgtgtgtaaaattgtgggcactaatggcatttctaaggggagggattgtggttcgaaaggtctgtggcccagaaaaggtgaaacaaggcctcagccctgggtttcatgggatttctgtacagcaagaggtgggggctaacttggcagaaggcagcaccgctaggttctagggccgccaccccctggcgctgccacagatcaggccgaggtgggggacagaaatgcccagccctagaatcctcctgraagatgactgggtttttcccactcccaatggagggtccccctgtctgctgtgtgggtggccccaactgtccctgagaatgaagtctggggccttcctgggattatagagaacaccagggttagaactgggaggcccttcagtcatcactggatctatggtgtaactgaggcacagagaggccagggggtgagtccaaggtcacccatccggaggccatgtgggccagtcctgcctgtgacattcaggtctgtgctccttccctgccagagcaccatgagatgagcgggagaggccctgggagaaggcgaggctgcctgttgcagctgggctctcccggtgcggctagggtgggggtgcacggagcagaggccgcagcccgggtgggcgtgccatcctcacacctcactgcatcttgcaacatcacctcccgctggctgcatcctcacatcaggttgtagccaacagccccagaattctgaatacagcrgcgatgacgggactacgaggctgcaccgcaggatgtggtcactagagggcagcaggaaagccactgcggtggctcagcaggaagaagttcccaggccgggagaggagctgcaggaagaaggggcggtgggcagagccagaccccgtgggctgcaggatgatttgttctaggccctttcctgagacaaaaagcaaaccagacatttrgtgatgatgatattaattgacatttagtgagtgcttacgctgcaccaggcactgtactcactaattagtcctcacaacagccttgttataattatccccatttttgcatatgcgaacatagaggcccagagaggtgaagaaagctagccaagatctctcagccagtaagtggctgagctgggatcagcagggctggtgtcagaggctgggttgggyctatatgcctggcattgactaaatgctttaagaccttcaattcttaccagcactactgtagctatgaccactttatggatggggaaactgaggctcagggacagctggtgaatcacccacgcccacacacctgctgagtgacagatccaggtaggcatggttcagggggtgagctctgtgaattacagttttccaatatagagctgttcactgctcccagtctgtgccctcatctcaagttcrctgataatgaaatctgagctttctcctgggagtgaaagctcaccaacttgcctgctttctaacagaaatgatagatcgtggtctcctgtgtccaaggtttgcttggatttttactaagcagaggtagagggaggccaggccagaggttgctagaagcctagggatgggctctgggggccacagtctggcttggaggatgagggcattgaggagtcttttgtagtggctaaggcttccttgggaacaacaggacctggccccagggcctctggtttccagggcagatgcctttagcataccaaggacacttggccagccccaggcccagctctgcyaggctgggagagcggggacatttccaggagggctggacttcccccatcttcccgttcccattccctggcttygccctccccgggggtacaagggaatggcctgtggctgggccttcaaacacatgcccctcctcggtgtccaggccacacctygtgaggccgagtctcgctgtcttagggatttataacatccagctgcttcagtgacttctgatttattagcaaagcagcagcttccagtcctggccttaagtttctctgggtggatgaagagttgggggaagaaacttaaacggccccctccccagcaagatggcaagatgtttctctttaaataaaaccctagggtgagttctgcttttggaattggaaccccagaattaagtgaagactccttaaggattctgtttcctgtcttgatgaggaccaaggagggtgtaatatgagtggaattagggaaaaggatttgaacgtggacttcctagcacgttgcctgggctggaatcctggctccttattatgggtgtgagcttggggaagttatctaaccttgaagggcctcagcttccttatctgtaaaacggggttgtgacagtatcaacttcatagagctggcatgagggtgcgatgagctgatggctgtgaaagaagcatgtgcctgggaggaacattgtgaatgcccagcaagtgcttgccttccttggtgttatttgacccatagcatctagaacagtgcctggcacatacaggagttctgatagatgtctgtgaataaatacaaaggaagcgtatccaaatgaaatgatgctgcagccaaagaacagactcctaaatgacttaaaaatatgacctggcactattattgatgacattccctgtctgtttcttgaaagccattcacattcaccatggggcactggggcagagcaggcctgcacttgcaggggagtcaggtttaaagtagaggggcctttctccctggatacctggcccagccccatgatggaggccagcatcctctgccactatgggatgaggtcggggtgggatgcagtgtggttgggattgtggtttttctctgatcacgttgagaagttcctaagactctaaactgcccctttccctcttgactgctacttggtgatctggtactgattcctaaagaagtgaaatttcatatttaaaacacgacttgatttctccatctgaacagtgggagtgaggaccctgacctccgagagtgcttatagggaataacacagtgctagaagttgggtgagctgagccaggcagaactgcaggtttgggaaaagaggatccactcacccgctcccaaaggagtcacgtcaaatagtggggtgtgggaagaatcttcacaaagcacgtgagttcaccctatcagctgtgaaccaacagatccacaggaccagaaagcaaaggggaggaacatgctctaagtctcagaagcatctgcctgcccagtccccgtcatgctgattcacaaatgggctggggccagtaatggcatgcatgtttgcaggccaaatatgtttaagctggaggaacaggaagccaaatctccttagagggaaagagctggactctggggaacctaccagatgggggttaaagcaggcctgtgagctcaggccggttcctctacctctgtgccttggctttctcgcctgtgaagtgggcagatattggcttccacatctggttcttgctagaaggacacgagctgatgcagggaaggggcttggcrcaaaactgtcaactgagataatgtggcgatcttggtgttttaattcagactctatgaggtgcatcgaggtcaggaatgctccctggtccactttcrctttgagtttcaggtagctggtgtcacttcggtgtggttggaagaagactttctccccagctgcattcccggaggcgccctttcgacctggaggccggggtaagcccccctgcccttgctgacttctgctaacccacttcctggggaatcgctgcacaagttgaattttaaagggttaggattatttcatggatttaaattgcagaaccctgccagtctccctgcctgctgggttctggtgtgagcagagggactgcggtttattagaagaatgtggtggggtgggcgaggaaggtgacaggagtgggatacagtccaggactcagagggccacactcaggggatcagagatggcactgggttggttggggcgctgagtcagggatggatctggagagcaggcagagcccttattgcctggccctcggggcagactgtgaggcacaggacacagaagggaaggagtggggagggggcactgagaccccagctccaccttctgagcccttcccctccctgtcttttgcagtctgctggccacagggctgccgcactggctgggactgccagctgggcctggagacgctggtggctgtggactccccagcttggagcagtccctctttggtaagtggttgaaccctcctgtgttctccccaggagcagccccagcccccactcaggtctggtagctgagccagcctccagagagggtgcctacaggatgctcaggtgggctcctggccccggactctcagcggccccattcgctctttctgcttctccatggtccctccccagtcccccttctgtgggcagaggggacacaggaggtaagaggggaggcccctgactccctaagatcttctttgcaggccagttcactctgtgtcagtggggattatgtcacctccatggcctggacccttgtccctagagaccaggaacagaccctgggtgctgggaagggttgcctctcagcagaccctggacatctgtctctgctccagagactcttagagactccacaagccccagaagtctacatctggagtaagtggtcacctgcatccatgagttggaaggggcttgacacagttgtccaccttgcctggccgtgctggcagctcaccgaccatggtctgcaggggtccttcatgctcaggggattggggtcagatggaggcatctgatagggactcttctttcccctagggatgggcagaggacagaggaaagaggaacacctggagaactgggcgccagctcgtgggggtgggagacgctggcagtgaggaggggcagtgtttgaggcaggccctcgtcatttcctcagtgtgggagtagggggagtcaggctcttgccccgtgaggcccctctaaggaactcagagctcaggataagaggcttccgcagctgtcygcaggttaaatcctggggtgcraggaatgtttgttcagctccccaaagctcccaggagtcccccagagaacggtagtctagtgtagaagctgcttaggtcttcagggtgtgtggtgagcactggacaggagccgggcctttccctgggccccytggagaccggctcttccaagggacaagccagtgcccccgccgtggaggcacctgaccgctggccgcctttgcccacagacctcaccccttggagaagcagccccatgaaggtgcccagccatgcaatgttcctggaaggccgtcctcctccttgccctggcctccattgccatccagtacacggccatccgcaccttcaccgccaagtcctttcacacctgccccgggctggcagaggccgggctggccgagcgactgtgcgaggagagccccaccttcgcctacaacctctcccgcaagacccacatcctcatcctggccaccacgcgcagyggctcctccttcgtgggccagctcttcaaccagcacctggacgtcttctacctgtttgagcccctctaccacgtccagaacacgctcatcccccgcttcacccagggcaagagcccggccgaccggcgggtcatgctaggcgccagccgcgacctcctgcggagcctctacgactgcgacctctacttcctggagaactacatcaagccgccgccggtcaaccacaccaccgacaggatcttccgccgcggggccagccgggtcctctgctcccggcctgtgtgcgaccctccggggccagccgacctggtcctggaggagggggactgtgtgcgcaagtgcgggctactcaacctgaccgtggcggccgaggcgtgccgcgagcgcagccacgtggccatcaagacggtgcgcgtgcccgaggtgaacgacctgcgcgccctggtggaagacccgcgattaaacctcaaggtcatccagctggtccgagacccccgcggcattctggcttcgcgcagcgagaccttccgcgacacgtaccggctctggcggctctggtacggcaccgggaggaaaccctacaacctggacgtgacgcagctgaccacggtgtgcgaggacttctccaactccgtgtccaccggcctcatgcggcccccgtggctcaagggcaagtacatgttggtgcgctacgaggacctggctcggaaccctatgaagaagaccgaggagatctacgggttcctgggcatcccgctggacagccacgtggcccgctggatccagaacaacacgcggggcgaccccaycctgggcaagcacaaatacggcaccgtgcgaaactcggcggccacggccgagaagtggcgcttccgcctctcctacgacatcgtggcctttgcccagaacgcctgccagcaggtgctggcccagctgggctacaagatcgccgcctcggaggaggagctgaagaacccctcggtcagcctggtggaggagcgggacttccgccccttctcstgaccygggcggtgcgggtgggggcgggaggcgcaaggtgtcggttttgataaaatggaccgtttttaactgttgccttattaacccctccctctcccacctcatcttcgtgtccttcctgcccccagctcaccccactcccttctgccccttttttgtctctgaaatttgcactacgtcttggacgggaatcactggggcagagggcgcctgaagtagggtcccgccccccccmmccccattcagacacatggatgttgggtctctgtgcggacggtgacaatgtttacaagcaccacatttacacatccacacacgcacacgggcactcgcgaggcgacttctcaagcttttgaatgggtgagtggtcgggtatctagtttttgcactgtcttactattcaaggtaagaggatacaaacaagaggaccacttgtctctaatttatgaatggtgtccatcctttccccatccctgcctcctgcccctgacgcccatttccccccttagagcagcgaaactgccccctcctgcccgcccttgcctgtcggtgaggcaggtttttactgtgaggtgaacgtggacctgtttctgtttccagtctgtggtgatgctgtctgtctgtctgagtctcgtggccgcccctggaccagtgatgactgatgaatcttatgagcttctgattgatctcggggtccatctgtgatatttctttgtgccaaaaagaaaaaaaaagagtggatcagtttgctaaatgaacattgaaattgaaatgctttatctgtgttttctgtaaataaaagagtgcaataatctctgtgtgtgattgcaggacattctgaatgggtacgagagggcctcagccgggtctgggtgttcctagctttggggaggacagcgagagagaggtggaggtgggaattaaatgacaagtctgcctttcagaactcttgtcaccctcaacactgagtttagtttaggtttttgttttgttttgttttgagacagagtctcgctctgtcacccaggctggagtgcaatggcgccatctcggctcactgcaacctctgcctcccaggttcaagcagttctcccgcctcagcctcccgagtgactgggactacaggtgcacactgccacacctggctatttttttttttttttggattttagtagagacggggtttcaccgtgttgtccaggctggtcgcgaactcctgagctctgggcattcctcctgcctcagcctcccaaagtgctgggattgcagacttgagccacctcacccagccgttttttttttccttcagtcagttgagaccgggtaacttatagccagggataatgttcaaagtctttaacaagtggtatggcttgctgaatcagagtagctggaggtaagaatgacatcctggaatcccttcttgtgctaaatgttacccatttagttggtgggtctgggtctaggatagccagggagggggaaacttcaaggggtggggtgcctcagggcagtggctgctgacccacagacctggaagtatttgactatttgaataactggtacaggtttactggtgtctacactggcagagaatctgctgtgcttcctccccttcccttcgtggcaatctagcaggttgctccaggcagcttccccagctcttattccaagaaaacctgcccctggggtggctgcaggtcacagctttgttgtcctgggacaaaggagtgtctggtgattaggcagccccaggggtcctagccaactggaagaagggcttcctgaggaaacacagtcctgggctattttatatgtgtcaggaggatgtagacagttcaacagctctagcaaatgccttaactaatagtggcttaatcaagataggtgattttcttttgtaaaaaattttactggggtaaaataacagaatgtaaaatttaccatcttaacctttttaaggtgtaccattcattaaatacattcacaacgtgtgccaccatccagctctgtaattttgctcattttgtaaaactgaaactctgtacccattaaacaaaaactccccacctacccacccacttccagtgcctggaaaccaccattctgctttctgtctctaggaatttgactactctagtacctcatgtaagtggaaccatacagtatttgtccttttatgactggctcatctcacttagcgtgatgtcctcaaggttcatccatgttgcagcatatgtcaaaatctcctttcttcttaaggctgagtaatattctactgtatggacataccatattttgcttatccgttcatccctagatgaacacttgggttgcttccatgtcttagctactgtcagtaatgctgctgtgaacatgggtgtacaactgtctcttgagacccttctttccatttttgggcatatccccagaaattgaattgctggatcatgtggcagttttatttttaatcatttgaggaactgccatactattttccacagtaggtgaaccattgtacattcccaccaacacggcccaagggtttcaatttttccacaacctcaccaattcttgttattttctttctctttttgaaagttagccatcctaatgggtgtgaggtggtcagatagtttattttccttcactctcatttaaaaggcataagctgttcaggtctggtatggtggctcccaggtcatgtgcccagatttcagggtcctgcctctttctatgttgttgctccatctttctaaggtgttccccatggctatgtggtcctagatggcttgctaggcagcaggaaggagaaaaacaggaaaggatgctacacctctgccatgtatgagcacaaccttaaaattatagacatcactttcactcatgtctaattggctacagcctggccacatggccattcttagctgcaatggaggctgggaaatgtagtcttttatctgggtggccataactgttaaggtggctgatgagtccaaagctgatctccctgagattcagtttctcttctgcacaagacaggcaggctaatttacactgtcattctttaagaccaggaagctgacttggaaaagcctctgtcaggactggtggccaggtcctgggtctcttctcagcctgtgatccacaggagctgcttctccagggtgcgatgaggaagttgactcatcagttggcttcatggcatcagtgcccagataggcctcactcagtgcccctggctggctgttccaatacccagggaaagcctgctccaatggccacagctggctgacccttcccctcttatagtaagtgatgctgggacaattgtcttcacctctgactgctctgtggtggattgtccctgagccagagacttctttcctctgggtaggtggcttcaggttggaagtgggagacactggagatcttggccttgctggagagaaactctcccctcaactgccgtaacagaagactttaataaagctggctggagctttcagaggaaagccctgtctagtgatggattcattcattcattcattcattcattcattcaagtatgtgcaggcactggaattatgggcattccttcaagaaacacagtctagtggaaggcaaacaggcaaaaagatggggagagcctgggtgaagtgttctgcccacgagggcagggctgggccccataccaacttggtcctggaaaacacaaggccactgtaatgagacacatgttggttttctaggccttatggtctcattctacctgtcttcccgcttagagaaatcagggaagtcttccctaaggaggtggtgcctgaattgattcctggggatgtaggagctggccctgtggagaagctgagggagaagtggtgaaaaggcacagagtggggaaggcctggggcattgatagctgcacaggcttcgggcaggggtgtgtggggccagaccgtgtaccagatcccgccctccgctcctcaggcctggaaagcttgccagttcaccaagggcagttcagccttcaagggatttagtttttatgaccacacccacaggacaaattcaggaaccagagagcttgcctgctttcaggataatgaccagactctcccagcactgtttgaagcctgcacattctagcccctgtaccacggttcatccagtaccacggttcatccagtaccacggttccctccactcttcactctccagccttcctgctttctggtgatttcatgaacacacagtggtagattgttgcagttacagcctccagtttgttcatgcctccctgtcccctcactgtttagtagtgtcttcccacgtggactctgggctccgccacatgccttgctctggtcagcggaacagtagcaagtgcagagatgtgaaaatacttgagctttggagtgtgctatttcttgctgcctcttggaagccttcaactgccatgtgcaggaagcccaggttagcttgctgaagaagaaaagcccaccaagaggagccccagccattgatcagccagttcctcactgacttggcaactgttgaagatgcatgagtgagccccagctgagatcagccacaacctaacccagaggattggagccatctggctgagcccagccaaatttctgacctacaacattgcctggatgaggccaggcatggtggcttatgcctgcaatcccaacactttgggaggtggagaagggtggatcacctgaggtcaggagtttgagaccagcctgaccaacatggtgaaaccctgtctctactaaaaatataaaaattagctgggtgtgctggtgcacacctgtaatcccagtgggaggctgatacaggagaatctcttgaactggggaggtggaggctgcagtgagctgaggttgcatcactgcactacagcctgggcagcagagtgtgactctgtttcaaaaaaaataaaataaaataaaataaaaggatgtcgttttaagccactaagttttggagtgacttggtacagaataaaagctaactgatacacatctttctctatcccattgcaggtctttgcatagactgttccttatacctgggttgttcctggtctcctctttacccagttgatatctccctactctttggatttcagcttcattatcaacacttccttggttttacaagactagttcaattatcccgatgataggcccttatatagcagactatataccttacatgtctggattatagacccttatggcaccttgtatatctcttttatagtgtttactacagttgtaatcatactttttattacaggamctagcacaaaataggtgtccagtaaacagcgattgaatggataaaagaataaataaaacaggtgttccccctttgataaaagagctgtcttgtccaaggccttcacttgggagtgggtaacgcctccaaggaatctgaatgagacctgcagcagcacatgccctcacaggctgtttcacacaatttagaggaggctgagctcagttttgttccaagagtccacatccttcccccacagccagcaactctaactctacagaccagcattggctctcctgtttctttgtcacgatgccatcacctgccttgctgcttgttacagtttccaaggctaacactctgaaggagaataacagccaacaaacatgtgtatagaatttgacagtttacgaagcacacttccccctcctgttagtcacacctccacagtgactgtccctgctgatgccaaggcacctctttctcgccaggaaatggtggtcagagccccatgtcggcaggacaggctttgcccccaccgcctctgtgtttcatgtcttgatgacttagatcctaaggagtaacttcctgctcttgtctccagactcagggcccctttcaccccatgggtctggggttgtgtcctgttatttcttttcatcacggacttcctctgtttgtgtgttcccacctgctcacccttgttcctctccttgccagcaacaaacactggcctcctagccacacttccctgggattctggggcactcactgggccccacttcctatcatcctagagggtattgtgcaggaacaaacctgcccttcctgaatcatcctgttcccaggaaaagcacttgctgggtaaggatttctccctgcgggaatgtctttacttctggggaaggaaaagatgttggggaagcaccttcacacaccaaaacacacgcttctgcctcctgagcactggaaagcaggttggaatcaagtcctcatgggcaagtagccagggtttgggctcaccagggagtcgagctgcagtcatcagcagggtgggctttgtgtctgtgtgtggtgcagccaggagactaatgcccatgttagagatctggctggcctgggagcctacagtcttcctgagcaggggacacatgggacaatccccaagcgtcacagagctttgaagcactccctagaaacatctacctaccctgcctgcctgtagttgcgtcttctgctccttggagatgccacctgctgatgacttctgattgaatggggtcttattcatcttgggaaactctgtgatgtaaagcgtgattctgattccagtttcatctctgccactcgctgtgtgatgttgggcgcagcacttaagctttctgagcctgcctcagagggctactatgaagactgagtaaagtaatgcatttacatgcatagaatggtgcttggcacatagtgagtgctcaataaatgctagcaatcatcatcatcattatcatcatcattttatcca

SEQ ID NO: 95286 - DNA, 47808 bp, Homo sapiens
ttaagtttgtgagaatcacccatgttactgctgcctgtaactgtaggttttttgtatggtattcctaagtttgaatacagcacaattttttagctattctttgtctaatggacatttgagttatccctgatttattattattactaataatactgctatgaacattcttgcacatgtcttttggtgcacatgtgcacggatttctgttaagtatatgctaggagtgaaactgctgggtcatagaatatatcgttcatgatttgtaaggtatttggcttttcgaatttaatatataacagacacttttttaaagtggttgtatcaatttacactcccaacagcagtgtattttaattgctcacatcctcccaaacacttggttttatcaatccttttaactttattcattcttgcgggcctatagtggtacctcattgtggttttaatttgtagctccctaatgagctaatgaaggtgagtaccttttcatgtgttcattgcccacttaaatatccatcctttggggcgggggtgtgtggaaagtgtcgcaggtagccactatctggggccagtgttgtgcaggcagtaaaaagaatttacgaggacagttgtaggtaaagaaaggcagatttattagagaaagtatgaaaagacattgcaagggtacaatgggcaggtcagcaagagaggagctgactacaaagagacaaaggcttgctggggattttataggatggtgcttgtgctgtgtactgaagagggctttgtgcagtgctgataatgccaaggttgcagtcagctatcagccaagggactggtgatagctgggcacaggaagattgtgagttatttgcacaggagggctatgtgtcctgggccacaaagaaaggtagacttacagtttatctgctttttctttttgctttccttcaatcccaccagtctgactccttttgcctaattaggactctacagaaagtgcctattcaagtctctggcctagtttcaaattggattgcctatctttttttattattatgatttctaagggctgttgacatattctggatttgagctctttaagaattataaatattatgtaagtatcttttctcattctatggtttgccttttcactctccgaataatgtattttgattaacagttcctaattttaacacagtccaactcatcaacattttctttaatggttagtgcttttcatgtctttttcaagaaatgtttgtcttcccccaaggttgcgaagatattctccaatacaatcttcttaaagctttatcgttttacccctcacattaagcatataatctatctggaattgatttgtatgttgtgagatggagtcaagtttcacttttttacaatggaatacctgattgacccattactttccccacttctttacggagacatctttgtcgtgaataaaatgtccagattcatgtggacctgtttctggattctcaattctgactyattagtctattgacctttccctaatttcatattgtacttttattataagtatcatcatccccattttacaaatgaggaaactaaggcacagagaggttaattagctcgcccaattaagtaatttgctagttaatgtcagatctggaaatggaacccagggagtttagttttacggtctgtgctctcaataagctttactgcttctcaagcttaacagttccaagaacaaacattttacgtcactacatcaaaataggcttttgcgtgaagccttgggaacaggcatgccacctctgcaccctggattggtcctggtgttccccgcccagccgcaaaccgaaccgccgctgtcccagtcctaccactagagggcgcggataacttaaactggccggggacttccctcccgccgcgcctggttaccttcagccaatcatcaaatatttacccaaagcgcagttcaaagccaaagtagaaagttgtctaatccagtctccatgcaggacattaacaaaaagagacaaaacaggactgatctatctgcgtaagtatcttcgggggagaaagacgccactcagttcctggctaattcatctcatccttaaagcaccttatcctaagtctctccaatctttcactcttcctagtgtaaactaggttgtttggcatcctcatgacaaccactctttggaggtactttttacaaggtgtacactagagtgcattattatgagatcaaaaattagcttttatttctctcgaagagacaatagtaccccattacatttcacttccttagcaatgtacaggtttctttggtctctgtccaatttctctgtgtcccttttaaagtgtaaaaacccaaagtggactttgcactctagtattctatctagtgtcagatttacttcccgattcttttttttttttttccgaagtctcacttcgtcactcagactgaagtctggtggcgtgatcttggttcactgtaatctccacctcccgggttcaagtaattctgctgcctcagcctcctgagtagctgggattacaggcacgcgccaccacacctggctactttttgtatttttagtagagacggggcttcaccatgttggccaatcaattcctgacctcaaatgatcctcctgcctcggcctcccaaagtgctgggattacaggcgtgagccaccgcacccaccctacttcccgattcttgaatgttacactgttaatatactgaagcaatatgcaattattcaatgaagtattaatagttcatctttatcaacttgacaacacaaaccacaaaaaaacacaaaagtaatgatgcagcaatatacaacatgcttaatattttaagttttaaaaaagctgggccgggtgcaatggctcatgcctataatcccagcactttgggagcccaaagagggaggatcgattgaggctaggagttgattgcttcaagaccagcctgggcaacatagcaagacccctgtttttaccaagaaaaaaatgttttttaaattagctgggcatggtagtgtgtgcctgtagtcctagctactcaggaggctgaggcaggaggatcccttgagcccaggagtttgaaaatgtattgaactagggtcacagcactgcactccagcttaggtgacagaacaagaccctgtctcaaaaaaaaaaaaaaaaaaaaaagaacaggctggacacggtcggtggctcacacctgtaatcccagcactttgagaggccaaggcaggtggattgcctgaggtcaggagttcaagaccagcctgatcaatatggtgaaaccctgactctactaaaaatacaaaaattagcccagcgtggtggctgccacctatactcccagctacttgggaggctgatgcacgagaattgcttgagcccaggaggcagaggttgcagtgagctgagatcacgccactgcactccagcctgggtgacagagcaagactccatctcaaattaaaaaaaaaaaaaaaaaaaaaaaaaaaaaaaaacacaacccagggagcactgaacctctgctttgattaaagttttaaaacttaaatgtttgtggacaaagtctagaaggcaacatgaagataagaaataattgatttgttaggttttgggaactgaggttgattacttgttttttcattattggcaaaatttcaaggactttaaaaaaataagtaaaatattttatgtagtcagcaacttatggagcccacattacatgtaagacccagggctgagcattacaaggaagacaaaaccagacacaggtcctgctgttcagaataacagtagctgacacagtacaaatgcttactatatcctaagtgctattatcaccctattgcaaagattaagaaagtgaggaacagagaggttaactagcttatccaaggtcacagagaataaaagcagaactagaatttgaactcagcaactccaatgtgcaaagcctcaggtttaaccattacatcacactgcctctcatgatagcttaataagagagcgaggggaggggagggaagtgacttttgatcattcaacaaatgttttttgagcacctactatatgttaggtaccagagtaccagctgagaagacactgaaaagtaagacaagcacagtccctgcctcacagggctcacggaatacagatatagcattatgggaatttagaggagaaaaagggaagaggacccatctctgaggttaagggagaaccacctccttacactctgtttcattcctagcaaagcaccaaccttgtggagagaagagggcataggagagggggaacacaaaaccttaaaataaaagtaatgaaagattgcatcgatttattcagcaagaatttggaaaggaaattcaaaaataaggaaagggtcaggtaagcggactaggataaacctttaagagcctgccaatatgagactctagttcaatttttactcaaataatccttgagcgttaggtgccaagccctgagctagacttcagacatacaactgtatgtaaataagccacagcccctgctctccaggagtttatactctaatggggcagaaagacttttaagcaagaaatttcagtattgtgtgccaagacaagtgaccaaaaagaagcacagaataagatggggcactattcaggttgggatcagacagcaagaaggtgacatctatactgaacaatgatacagagcaaactggagttagaaacaaagatggaagagggagtgtgatctagactgctggaacagctcgtgaaaagccctggaaatgacagagaatgcctaggattgcagtgacactggtttagagagtggtgccaattaatgccactaaattgcagactaaattactaaatgctttcatcactctgtcccaggtccaggaagggttccaagcatgggctcaacctagggtcaagttgaaacagactgttttccacctgataaccccaaagctgcagcttgactaagccgtcttagcccaagagggttccacctggcgtcccagaagaatggggacagtgtcctccacatctctgaaccctacccggaatccagtacagtgctttgcacacactggatctactaaacagactaaaagaaaataaattcatctgatggcataattactatctcaattcaagtcccccacattcccagtccttactcccaaatcctctactgctgcatattagggcactccttccccgtccttagactctgccacttggaattaccaaggatcttcgcacaaagagaagtatagcttcgtggataaaagcagaaatttcgaaatcagaataatctgggtgaaatcctcttagcagctttatgatattgaataagtcactcaacctgcggcaccctccgttttcttcatctgtgaaacgaaaacaacagcagctttttcactggggttcgctaaatgaatgtaactgggctgagttgagaatagtaaatgagaccgtctacgtaaggagatgatcatgtctcttgccatataaagtgcacttaataaatggcagctgtagtagaatgatgtagatggtgatggtgacgatgttggtgataataggaaggtcagctgtcagtcttgcaagtcactggctgtagtcacagcaacccctaccagcccaggcagcttcttctagaagcaggccctgaacaggacgtgggtaagagatccgctgtcccttgagacttggcctactcccggcactccgcggacagccccagcctgcggacagccccagcctgcgtcacttgtccgcatgccagctccacccgggcggacccacacatggtaggaacgtgagggggcgggcctgttccggcgcctctgggccaatcgccaggtggaaggcactcagccaatggcagaggggctctggggccctgtgggcggggactaagggtggagttgcggcgtcataggtcactgggcgggctatgggcggggtccacgtcgcctaccggggcggagmgggggtggctggagcagtctggacagtcatggcggcgactgtggcgacggcggcagctgtggccccggcgccagcgcccggcacggacagcgcctcttcggtgcactggttccgcaaagggctgcgactccacgacaacccggcgttgctggcggccgtgcgcggggcgcgctgcgtgcgctgcgtttacattctcgacccgtggttcgcggcctcctcctcagtcgggatcaaccgatggaggtgaggggacccggggctgggtggcggggacgcagccaggaccctgaccctggggtgaccggcgaacagcacgatccccccaaccccgccacggctggaaggccagaggggagaagccgagaccggggaagtaattcgtcatggtcctaacgcgccggtgggccagggttcagcctctgacaaagcgcgttcgcactgttacccctttgagcctcacaactgcctgtggaacggagatcatgatccccgttgtacagatgagacccttgagccctggagacccaaagtcgacctgcccaaggacttgtagccagtgagtggcagaacaggggctcctggtctagggctcttacggtctactcagggaggggcggaagggagataacgtagtgtgagggcggracgggtttttgctcgcattcttcaagagcccgttgctgggctcggggagatcactccgaagcctctggctcgtttgaatccgccctaccacccatcctggctaccctgcacccagaccgtcctgcctctaggggtgtcaagtgaccctggcttagcattaaataaggtcttctcccctatattataaataaagaagccaaaggcgtcttcaggtggagtcgctttatgttcaaagctccagagaatccaggggattctccaaaatgttttaagccctgctctggagctttgacctcgatagaaaaatttaaaagaatccaaagtgtcaccccgtcatcctcttgtcatgattttagaggacagtagagccattagagatgagacttttatgaactgttgtggtaaggttagggagcaggaaagccatgatatcaagggcccctctgatgaccccccaggagatggagtcgacatgatcatggaaaaagatgaacaggtcgttagtgtattttcactgtraacagtattcaaactaaagagttttgagacataatgtacccatcgctcttcagaacacctagtggcagtcgctcggtttgtttgcattgttctggggaatgtttgcttgtggccttgttgcatcgatggacagggttatttccaggataccgtggctctcggcacaccattcttttctctccaaggtgtgtgccctgctaagagagtgagtgctgctagcagtgggcctgttcagtgtcccctcctgcccagaaggaacaactaaggagtcctgtggagagcctgcccacagttttcaggctgccttattgctctgtctctgctccagttttctacagataggaggttgggtttgacaagcatcatcaaatgaccatccctagtgtgcacattaagccaagcctcagactttgccctgcaccagtcggagccaggcaaatggaatccgactaccttcttgttacattgtcacagagtttcttcttttattgggttttgggggacattgcatagtactgcctactcttttttgatagggaagattaaaaatcaacaataaaattccygttgattaaactccagtttgctaggaaccaggtgtttatggatttttgtgggtcatcattttgtgatcgtgctatcaatctagtgaagaagaaaaggaatgtggctcagatgcctgagtcaaatcctgaagtcagaggctgtgtaagaatgcagatattaattgatcacttaataagtgcctaatatctgccaggtactgctctagatgttgctagggatacagcagtgaataagcagatgtgtctgtgctccagaactcctggagcctacattttaccaacaaacaaccataatttagtgaaacgaagtgccatgagaaacataagataaggggacagactagagcagtggttctcaatcttggctgctgtgcattggaatcccataagggtctttaaaagatacctgggcccctttcccccaattctattttttttttttttttgagacggagttttgttcttgttgcccaggctagagtacaatggcgcagtctggactcactgcaacctccacctcccgggttcaagcaattctcctgcctcagtctcccaagtagccaggattacaggtggccatcgccacacctggctaattattttgtatttttagtagagacagggtttcaccatgttggctaggctggtctcaaactcctgacctcaggtgatctgcccaccttggtctcccaaactgctgggattacagggcatgagccactgtgcccagcccctttcccccagttctgttagaattgttctgggttatggcctgggcattaaggtttggggattttttgttttgttttgttttttgttttgtttttttttgagacggggtcctgctcaagtgacaacccaagctgaaatgcagtggcatgatcatagctcactgcagccttgacctcctgggctcagcgatcctcctgccttagcctcccaagtagctgggactgcaggcatgcaccaccatgcctggctaatttttgtattttttgtagagatggggtttcaccatgttctccaggctggtcttgaactcatgggcttaagcaatcacctgcgtcaacctcccgaagtgctgtgattgcaagtatgagccactgtgcccggccttaggcattaaggtttttaaagctcttattgcagcaaagcttaagaagcactggactagagaacctcagtcctgagacgggcaacctaggaagtatgttgcagtgcattggcaggaagtctaattaatgttggcattcagaagaaagagatgaagtaacacaaacagattgaatataataactgctcctgggcctggaaacagacacactcctaccacctccaccattctgcttgcttcctggatcagttgaaggcagagctgcattctcttttgtgcacaaagttggggatagaggggagggctggagccagccatatcttgacatgactgtagtatgtgtaatcgtcccgtggttgtttctggattccaagagtggtctaagagaattgtgctgcagcataatgtcctagctctgcaactgcttaagttgtctctgagaagcctccctgggaagggcaagggaccatctgcaaggaggggaggacccaaaatctgtgactctgtttccctcctgctccttctacactgactcccacacaatgtttttctgcagaggaaatcagattaaaataactatgaatggcactaagagtaaaaacggacagagaaatgcaaccaagaaatacacatattgattagcaagaagaagcctagcatacttcttgccctggtgatggtgggaagtttacgggctaattgtagctatatgagcctcaggacttttttttttttttccaagtgctacttggctaagccctttcacattttccccagcctcaccttccccagatttgctacatctagaaggaggtactgcagcaagaagataaactaaaggaagatgtgagcagttcctagattttaaaatgacctctgtggtttttcattacctttctctccccactgcaacttggataggtgttagcaacagttcctcttccactttatttaaatcattttgtccctggctctgtgctkcgcctctttcaggagcttctgggacagagggaatttgtagaaataaaatatgttccctctcagcccatttctcttagaattggtaaatgaggtaaactgggaacttcccaggatgccccatgagaacaagtgtgtctctcttcccagatgctgagagctgaacactgttggactgttgggaagtggattgagaacgctagtctactggcagggaaacaggagcttctctgagctattcacattggtacctgmgagaggcactttactgttctgctgccaaggaaatgtttctgtttgcccaaaggggataaaaaccttcatctttctctttgaaattaggaaagaataaatatatttttaaaataataagaatttaatatttaagtatttctaaatatcactcagatacttagaaataaatccctgccagagattgtgagtttaggttatccttttccatggggcttaagctctcttaattacttaggaaaaattaatttctattaatatcctatgtagccaatctgtgccagccagtggtatcatcatcgttgttagataaccttgccttgaagcagaggaacttggtcaaggacagcctggacccaraagaattcactgttatcctccctccccccattaacaacaaataaataaaatattcctcaacacaggatcagccattcctagagaaggccttccctaaatatgagtacttaatcaaaggatctgcttgttttattctaaaaggctagccttgtagagtccctgagttatagtgtcctctctatatttttggaaatcccagtctggttttctccagttctgcctgcctctggctccagagcacttacataataatgtaattcagttgcacatgttgtctaatccaaagggtaagctttgctctcccaggaccatgtgctctgaattttggccatgtgagctcagctaagagctgccaagggtgaagtgccagcccccaacaccaccatctccaatgcccaggccagtttccttcagagtcccctcattggagtaaagagaaattggagtaaagaggagggttctaagggaccacagaaggcccaaggttctctctggtgaaagaatgcatatacctgcccactgagcctttgcccagtcgcagcactgctccaaatgtgagggacagctgtcacctggcaggcctcaaaggtagtaccctagtggtggcttctcattctctgcattctctggctgcctggagtctggagatactggggaccctcctcacatccctgtctattgcctccgtgtggtggctgtcctgagccctcccttcccgggttgactcgggagggaagttggaagaagcagagcatttctagcaggccaaaggggaggcagaaatatggatgctcaagagagaaagtttagtacaaacaaactagaagcaaagaaaggcaacttgtaacagagactagaagtaaagttcagttttctagagtagtgcttgtgaaactttaatatgcaaatgaatcaccaggggatcttgctaaaatacagattctaattttggaggtctgggttagagcctgagattctgcatttcaacagactcctgggtgtttcacagccaatgctgctgattgtcagaccacactcagaggaggaaagatctggcagcagaggtgttgctggcctttgagttggcctgtggtgctccctaatggctgagcccagggcagcacagcctcagtgctctgtttgttgagaggcagtggctggctaaaaacgaacatgtcaagcctgacagattgcctaggtttgaattctggccacttactaggtatatgatgttgggcaagtttcataatctctctatgcctcagttccctcatctataaaatgggaataataatattacctacttgattgggctgtttgagaattaaatgaggtaatgtatgtgaaacaagtagaatagtgcctgtcattgtaaatgcttattaaatgttaatcattgccattattatcattatttttatttagttgctgggttcagagttgggccttctaccagcctcacatctctgcttcctgctataaacatcttttgtgaaagaagaaaagggctctcataggattagctgtactttagagatgctacgaggaatctctccttttagtaaatgaggtctaaaaataaagttctatagaaggcagattgctacatgttctggaacctagatttcatgtgcattccaaccttatttatagcttcaaatcaaagtcctatgcagcctggtggactgtgaaggaaaagacccccaaagcgcatggcaaggacactcctgggagctgcagatggaggaccctgtgtcctggggttatgaaatttaaatcactgctcctagccctaggcattctacctggcagggtccaggtttcagatggcatgagaccatttgcatggatttctcttcttttccttccagaagagtggtgaggcttgggggaggccaacacaagtgacgcacttgcagctccctgttccttttctggaggtgtcaatttttcaaaaacagaaattcacagaggtggagcttttggtttgcataaagcagcattcaacctgtttgtcttccatcccaacctctcagagagtcttcctcatgctcttttgcaaacatgatgctttgagccgaggccagggctcagcccatgctagaatgtgggtcggtggcattggccgtaggagtgtgtcaagttgtgtacgtcagaggcagcagtgggggctggttctagttggcagcctgggaatagtcactgcttctgtaagcctccagtagtcagggaatgtgactgtgatgtgccatttctattgttgacagagaaaaatgctggggatgggtggagacccaaggggtagatagcaggtgcctcagaggtatctgtgacatatgcagattgacctgtgggttcttgaagaagaagataagaatgccagtggattacctgtagtcacattgctattagagaacaggattccaaactcctgagggcctgcagaatctcagcccctggaacagagttggtgtgcaactagaaatctttagaaatggggcacagarccctcacggtggctcacgcctgtaatcccagcactttggatggctgaggagggcggatcacttgaggtcaggagttcaagaccaacctggccaacatggtgaaaccccatctctactaaaaatattgtttaaaaaattaattgggtgtggtgcacatacctataaccccagctactcggaaagctgaggcaggagaatcgcttgaacctgggttggggaggttgcagtgagccgagatcacgccactgcactccagcctgggcgacagagcgagactctgtctcaaaaagtaaataaataaataaaaaagggcacagagaggaaaatgtgggtttcagagtgaccaccctaggttcctgaatccccagctttgtcacttaacagctatggtcttagacaaattaattcacctctgagtgtctcagtttcctcatctataaaataaggatggtactatttccttcaaaatagttgagagaattaaatgcagaaatgcacttaaaaagcatgacagaaccaaaatcccattgataaccttggttgcctctggggagtgagggaggggaaaaccctttctactatgtaccactttgtcactggaattttgagccacatgaatagtttatctggttataatgttaatttaatttaaaaataaaacgctgaaggcactcagcaaatgttaatgtcctttccctttcccctggtgatccaggtctcctgctgaagttcttgcctagctgcggtcttccccacccccacccccacaaaaatgtgaagatagctattgagaagtaccttttaaggccttctccctcttgggatgagaacctgatcaccagagccctggagaggcctggagagtgagccacctgccaaacaaagctctgggaactagggacccattgcaggctgtgaggctgtggcagcagaaatacgcatggcccagagcatgcatgcagaaagtcaaggagtcttttccaccagagtaaggaggattttcccggctgtggcagtctggtcctctgctaagaggaccttaatgcttcataccacagtattgcactggcttttcagatggctcccaygtgagtctcacaacaacctcatgctgggcagatacttatatctagccccagagactgcgagggagtaagtgactagcctctgatcacacagaaacaccacactaggaacagctcacatttatctcatgatgtctgtgtgccaggcacagtgctaaatgtttttcacacattattcgattttcttttcttagcaattttatgagatgggtactaacatcagcttcacattaccggcgagaaaacaggcaaagaggttaggttattgcctaaagtcacacagctagtaagtggcaagaccagggtttgaagcagagcagcgctgatccactaccacatccctcctgggctggaacccaggcctctccagccctagtgatcatgaggctgcctgttgggcataaacagcgaaccagtttctccctgctttgttaggaaagagagccactcttcatgatgttatcactaacaaggcctgtgtggactccrcaggttcctacttcagtctctggaagatttggacacaagtttaaggaaactgaactcccgcctgtttgtagtccggggacagccagccgacgtgttcccaaggctgttcaaggtaagcgtgcagagccccagagaagacagtgagattctgtccctgasggtttccccacagcctgagtgatrtgatattccgactgagggaatggaaacatcagggctggtctggctgttgctgctagagaagttgggagcaaaggcagccagttagcttgctcttggaatggaaactgtgttaaggaaaaaaattctgggaaaccagtgtcttgttggaaagctctcagctcagtccagacataggatgtggtaagtcattccactctggatgccactggcttccttcaatgttttcttggctcaagccagccagatttattagggttccttctaggccaagactttgagggtggggtttcatgtctagcaaggtacatttcccatcttgctttgctctgcttattgggaaaagtcagccttttctgccgggcgaggtggctcacgcctgtaatcccagcactttgggaggccgaggcaggcrgatcacgaggtcaggagatccaggccatcctggctaacatggtgaaaccccgtctctactaaaaatacaaaaaattagctgggcatgttggctggcrcctgtagtcccagctactcgagaggctgaggcaggagaatggtgtgaacccgggaggcggagctttcagtgagccgagattgtgccactgcactccagcctgggcaacagagcgagactccgtctcaaaaaaaaaaaaaaaaaggtcagcctttctgaggaagctttcttgtttcccatggggtaaatgattgatagaaatcttcattttggtgccacataggtttctgtttgcagtaacggggccagtccacttttccctcaatccctttaaaaagtatattctaaggcccacatagaagcacaggaactcatggacagagggctgtgggacagactgccatcaccctcagcagcacacaatgattgtcatgcccctccccaccctaactccgagacaaaaggaaaagtcatgtcaaggcaaacagcttagtgaatacatcatccttcaattcccctccccgtaaccccacacataattgtgcatacatgtacaaatcacacagtgctagtaattgcccacattcattgagggctgcctatgagtcaagcgctgttcccagtgcttgtttacatcaactgagttcttcctcacagcaggcctaagaggtggctactgctatcccgatttacaggagaggaaacagtcattggttgtgaagttaataagtgacgatcttggattctgactctagagctgtatccttacccaccataccatataaatacatttgcctcccttctcccctcgacattgccctttttctcccccrgcaactcagaggcyaacccacttatatcccagagatatagctaggtcatccattcagtcatgtaatgtatttttattgagcttctgctaggtactaggccccatactaggtataagggtaatgatgatgagtgagacaacatggtttctgctctgagagttcacactaataggggaaacaggcaagtgtatcattgtcatataatacatgctgcagtggaaaaaagacaaggtgcagaagaattatattgaaggaggaggtcaagaaggcttcttggagaaaatgtaatttaataatattgttattcacaggttacaatgagtattcagtgatgtaacctatatgaactataagcatggtacctggcatatagcaagggctcaatcaatgtttaatgctgatatcctcgaatgagggataactggccctgctaaggacccagtccccgggcagggctgagtcaggaccagaccagcctgtgcatggctaggacatttgcccctgtggttcagagctttcagagactatgaccagagactttggagaatgtgtttttcttcttgcaagttgcatgctctagggctttctgtgggttgactgtacaaccattcactgggccagcttgctatgagatctagaaattcctaccagaaatgactaaaggcttaggaaagaacttcctccttttcaacatgtagcccctctggtcagtttcctctgacctccagactaaggatcgcttccccyttcctgactctctcagggctggaacctattagctctgtttgctattggcctcaggagtgttgctgtggaaacaattaagacacttcacatagcacaactctgccaagaaaactaggccacaagtctgcagggctgtgaggagctctgggaaaagcttgctgagcaggcagaaggctgtggtcctgtcccacctgtgagtcagtgccactctctgggactgggggtttcccaggagcgttgtatttatggcctcctgctgcattctcctacctcaaggacacagcaagtgcacaaggctgmctacctctctcccaactccactgttgctgtgctgttggcttcgccacactgcctgccctcctcaaactttstgaacctcagcttgtttgctttccagatcaaatccctgttcctagttttttctgctgcccatcagataggtctctagactagctctgttctctcccaggaaggaactgagagtccagcttccccctcctccccaaacacagtgttgagcataacagatcctctccccacaggaatggggagtgacccgcttgacctttgaatatgactctgaaccctttgggaaagaacgggatgcagccatcatgaagatggccaaggaggctggtgtggaagtagtgacggagaattctcataccctctatgacctggacaggtaagagatggggcccagggatcaggttaccaattgtgagagttagtaatttgggcccctgctgagcggaactcagagaggttcagcattagggctacctgacccaggaggcatggcatcttctagaagctggaggagaataggccagagtcaggacctgtagaacaggtcacaaagagctttaccccattgaggtggcagagaggcttgttaggcccaaagcatggaagcagtgaggacccacactcagggtatttacaaatctgctcctagtmtgcccgagtcccacctgtgcctcatattcccacttccatcctgctcaacagctgccctctgacctcagtggaccctgtctgttacccctccaacagacctctgttcacacaggtccagtttttgtacctaagatgagttcctaggctgggcatgctggctcatgcctgtaatcccagcactttgagaggatcacatgagtccatgagttcaagatcagcctgggcaacatagtgagacccccgtctctactaaaaataaatatattagccatgcatggtgggacatgcctgtagtcccaattactgaagaggctgaggttggaggatcacttgagcccaggggcttgaggctgccatgagctgtgatcatgccacgtcactccagcctgggtgacagagcaagatcctgtgtcaaaaaaaaaaaaaaaagagttcccaggttctatgactatctgggtttccaggccatgttgcttggtggcggggagggctctagagatccctgcagggagctgctaactacagaggagcctcctcccctggtgacagcctctgtgctttcagagattctaggaggaaatcctctcctccccttccctgccatgccagagctgtcaccctcctgctgctgctgctgctgttgctgctgctgccaagccagcagccgccgccgctccccacccccacttcccaacccagtgctggctgccaagaagccaggtcacacagctgtgcacgtgagccgggccctcaggaggagaggctgggtgtggagatcctcctcctgctgcgtgccagaggagagggaggcatagcagaggcagcagccgaccatatatctccactaacgtggggagagcaaactgagaaatgaactcacccagccagatgggccttgcgtaagctacttcttggccaagaagagccccgggaatgtggctccataccatcccaattcatccttatataaacagcctccgttctcttcttcgccctctgatactccttccttcttgcatgagtgcagttatgttttccctggtcatgaaaaatactttgtaaactacaagactctctttaagtatcagttgtggctatgaactctagctccagtctctgaatttgggaggataagctgtcttccacctctctgttcaatgttctaataaatggaggctaagaaggggatgattttccaagaaaggaacatgtctgctattccttatgatgttagagttaaaaaaaaaaaaaaaaaaaaacatgtcttcagctcttatcaaagaactttctccagggcttacatgggtggtagaggcctatggggattcccttagcttggacagataggccaagtgccaagcaggctagtagggatttttctgtgattagagattttgtcagtctctgtctttaggcggctctgcgtcaacaccagggagcccggaattgagtcccagctctggccctgccttgctccattactgaggcacctgcttcagctctctgggctttattttccctctcggtaaaatggagatgcggcctcccttgccccctcctttccactcaggcatgggacctgtgagtggatgaggaaagccaccctcaaagccttcagagtctgggttcttttttgggtgggcagggacccacatcacagggccatgtgggtaacactagctatgctttgggctccccaggatcattgagctgaatgggcagaagccaccccttacatacaagcgctttcaggccatcatcagccgcatggagctgcccaagaagccagtgggcttggtgaccagccagcagatggagagctgcagggccgagatccaggagaaccacgacgagacctacggcgtgccctccctggaggagctgggtgcgtacttcctgcccagagccacttgtgctggtgcctgcttttgtgtaaagaaattctttgtgaaagtaatgcatgtcattatagaaaggttagaaagcacaggaaaacaaaaatggaaatggcagtcactattactccaccacccagaggtaaccacaattaattttaaactgtgtccttctagtatttgttctgttcatactcatacatgtaatcttctgtttctggttctagatcatgcctctatttttgtactaacctctcgcagacaatacaggcactgcctggtgctggtgtccatgggcttctcagtaacaagatagctagtattgcttctgttgaaagcagggaatctgtcagcctctcagattactaactacactctttcacccctccctctttcttaccttttttttttcttttttagacggagtctggctctgttgcccagtctggagtgcagtggcacagtcttggctcactgcaacctccacctcccgggttcaagcaattctgctgccccagcctcctgagtagctgggactacaggcgcctgccatcacgcccagctaatatttgtatttttagtagagacggggtttcaccatgttggccaggctggtcttgaactggtgacctcgagtgatccacccacatcggcctcccaaagtgctgggattacagacgtgagccacacctccagtcttttgatctgaacaaagctattagcctttttcacctgaaaaccacagttgttgccagctaatctgaaaaggcaggaggtccgggattgttgtcatctacctggagcgatgagggtgcaggggaaagcagagaaaatagtgactgtgggaagagaaccaagttgacctagaaaacgctamaactttaaggattatctaacccccagtagcaccgagacactgtggttcaattctcataaagttcaaataacagaacagccgtgccgggctatcactgaaatggtcaaacctcctgtcttgtgacctttccttctcttcagggttccccactgaaggacttggtccagctgtctggcagggaggagagacagaagctctggcccgcctggataagcacttggaacggaaggtatgggccgtttctgagacacagagctgcagatactgatatccacacagcaggagatacaggtcatgtccatgtcctttagtccctcttagctcacattgtttggaaaatgaaaaatcctcctatcctcctgatggccataacaacagcaacactaacagcaactaccatttagagagtacttaccatgtgctggtcactaggctcagcatttytgggttaagcacctgctggcatttcttttaatctttccaayagcctgcaaggtaggtactaagctgttcattctacagattacaaaattgaggcttagagaggttaagtaacttgcctgaggtcacaaagttagtaattacaggttgagtatcccttatccaaagtgcttgggaccaaaagtgtttcagattttagattcttgaattaggaatgctcmccttataacacagtaagaccttgttctatgttattctaaagctatgtcggattgcttttctttcatctgtgggcaggttccccctactaagaggatatctggttagtaaaatctataagattattttgtgttgatgtgtctccgcacctttttgctggaactctttcagcgtgttgatttccatatgcttggacacagagcaaatggcccacctcccagtgcagtgagaactggggaggaaagaagcccaggcctcagaggcacagtgtcacaaagtcctcactcccctgcagctagaggagcagagaaagttctcatgtccgagaacagtcagctcctagtttcctgccccctgcagctggtttataaaatgtcagctttttctatgcctgctaagatggctaggtattttgcctagcagccagatgatgacgataatagaacaaggaggccaaggcaaatctacttgggaagaatgttctccagccctggaggtgtccagtcaacagtgaaggcccacagcctcgatgtttctacctggttgtttccttcagcctgggacgaaagcaagccccacagacttaaaggatgagactagctatctctgtccacatcaaaaggttcacctagagattcttgggcccagtttgaagacaaaggttgggccaaggggcagaagggtggagatgacaaatgggattgcaggagtagagtaaggcttaaacctgtaaagagctatcatctatggttagtttttatcagctggagaacattttgtagaaggatgtcccttaggtcaccgacaggagctccttttccacatacccccagagagcgggccccttctctcaagggcccttacgccatggacatattcagactcagtggtgcccagaggaaatactgtgtcctgcacatctgggagaacaaatggtgctagagatacaggagttgaacctgatttcaggatgtttattttagcttccttcagttctccaaatctgaagggagcacctactcatgccagtttagcaatactagatagaagaaggtatgtgcctcttttccgaaagcaccaggaaaagtcccaaggcatgttttcattgtcctggtttgggtcatgtgactgtccctgactcaatgactgtggccaggtataggaggtggtgctttccctggccagacttgcatcatgagtccgctcccagaactggaaggtaggtttagctctgctttatccactcggactaggatcagggaaggctgattctccacaggaatatgagatgctgttactgaaaagcagaggaagctacatgatctttaccactgggttactcaatagtagatgagggcaagcatctctctataaaagtattctgattattaaattaaaaaggaatggtggaatttgaataccaccattttgtaaccctcaataatgatgcattatgtattggtgactgctgacaccatagaaggaggcaagcattatgtgccccctgtagtcttgtcaaagggatcaaacctgagtccagtccagtttctggtactagccaccaatgtgcaggtgatacacaggacacagcacttgttgaactgcaccatgagtatacagtcagcaaaatccagactgtgggaatcttggcaagtcagatggcctggattctttcccagaacaatggaaaggaaaagaaaaaaatggcataaaatgtgcagattaaaagaaaattaaataacatattaaagttttttttaaggccaggcacagtgactcacacctgtaatcttagcactttgggaggccaaggcaggaggatctcttgaacctaggagttcaaaaccagcctgggcaacatgacaagccctcatctctaaataaaaacaaattagccgggtgtggcagcatgtgcctgtagtgccaactacttgggaggctgaggtgggagaatcacttaagcccaggaagtcatgccactgcactcctgcctgggtgacagagagtggggtctcagaaataaaagaaaaagaatcccagcactttgggaggccgaggcaggtggagcacttgaagtcaggagttcgagaccagcctggccaacatagtgaaacctcatctctactaaaaatacaaaaactagttaggcatggtggcgagtgcctgtaatcccagctacttgggaggttgaggcacgagaatcgcttgaacctgggaggcggaggttgcagtgagacgagatcatgccactgcactccagcctggttgacagaatgagactctgtctcaaaaaaaaaagaaaactgagtagctgggattacaggctcccacaatcatgcctggctaattgttgtccttttagtagagacagggtttcaccctgttggcctgactggtctcaaactcctgaccgcaagtgatcctcctgcctcagcctcccaaagtgctggaattacaggcatgagccaccacacccgggcagaaataaagttttttaaatggccaagactaaattgtaatacctaggaatgcacatttgggtaaaaaaaaaaaagctacttaaacacaaagaataactgtgaaaagataaagtccttcctttcaaacgttttgccaaaatagaaaaatgtaaacatttcagaaatgcagaacgtgtttattataaaagctgaggtaggggttgcatatactggggggcaggagggaactattcctgggatgagcacatagactcttggggtggctgtcaaagctctgtttcccaaaccttggtggctattgcgtggatgtttgccttagaataattcattaagtcacacatgtgtgtgattttctgtatccaagtttcatttaaaataaaaatattttaaaagctgggggctagcaagggtgtgtacacgcaaaaatacctagtatctgttagaagtgcttaacctgataccacaggggttacctgcagaggaggaagccttgaggttgcgacttgaaggaagagtctcagttaaccaggtgaaggtgagggaaaggaagacagtggtccagaggcagctgcttgtgcagaggcaaaggccagtgagagcagatgcgtaaagaagaggggcagcaggaggcggagggtacagtgagccgagatcacaccactgcactccaccctgaccctgtctcaaaaaaaaggggcaagagacagagctggaaaggcctgggtgctggggagccacagaagctttcatgaagatttgggctctgtcctcagagcaacaggaagcccactgtgtacattatcccgagcaacaggcattacattactctggtcccagcgtggagaatgagttagcgggggatgggagtggacgcagggaggccagtcaggaggctgccacagttgtccagtctagatatgaccttagcctgaaccaggttggtggcagcagggaatggaaagaaaaggacagatttgggaaatatttaggcagtagaattgacaggacttggtgaggggacaaaggtgatggctaggattgtgccttgggcagctaggtagctagcagtgtattatctgaggtagggaggccaatggaagggtgggttaaaagaaaagggcacatctcccttgagctgcctgagaggcagccaagtagaggtttctagcaggcagctgggtggagcaatctgggctagagctatggatgtggtggttgtctgcaaaggggtggaactgggagccatgggcctggatgagcttgctgaggcacacagttgagtagagaacctagagctgagccctgggtacccacatttaagggagaggcagaggaggtggagctgatgaaagaccaagagcgccaggcagctgggagataccaggagatgtggagtcacagaggccaaggaatcaagaggataagacagcacagttggcaggtatagcgctgctgagagatcccaaaatacaaggtcagaaagtgcctgcaggactcagtggcacagaagtcacaggagactcttgtgggaaccagccttgtggtcacctgaggtttggagttagagaccagcctggccaacatggcgaaaccccatgtctactaaaaatacaaaaattagccaggtgtggtggcaggtgcctataatcccagctactcaggaggctgaagagagtcaaggttgtgaaacagtatcatggagaggaggagaggatgttgggagttaagaaagtggaaataggccgggcacagtggctcacacctataatcccagcactttgggaggccaaggtgggcgatcaggagaatcccttgaacccgggaggtggaggttgcggtgagccgagatcacgccactgcactccagcctgggtgacaagagcaaaactctgtctcaaaaaagaaaaaaaaataaataaaaaaagtcgtgagagactgcatggaacagcaagtcaggaaagtaaagtcctatgccagcaaccagtgatgataaaaacatgaccagtaatgttatatgacacatggccccagaaatgaatgattccattggtccccaggaatggattggaagtttcctccttccccagctgctgttgaacaataatgcgaagtccctggtgtctgtgatacaacctcagggccgctagtgactagagaagggactgagatattcttttctgtaacatagaagccttgtttcctgctgtataattagagagttcattcagtgctttcagaattctttcatatctcattttaatccacagaagattggaaattttgttcttatttaatagatacgtagctgagggaagtaacaacgtgttcacagtcaccccacaaattaaagagcaagtcagagaatgacatagactcgttgtttggtctgatggtggttccgtctcaaaatcggctggacaagcacagtgttccatggctccatggctggctgttctgtgaccgtaggcagattccttaaccacccaatgcctccattttttcctctgttacwtccaagcctttccttttgccaccttctctttctgctgtaggcctgggttgccaactatgagagaccccgaatgaacgccaactccctcctggccagccccacaggyctcagcccctacctgcgctttggttgtctctcctgccgcctcttctactaccgcctgtgggacctgtataaaaaggtaagggggacatacctgcccacattgcacctaaggcctgcagccaggccttttgggcttgtcagtcaccctaaaaaaggcactggtgggtgggggttgggctatggcccctggaagggcctaagtgtgtgcagatagtccggaggaggagagaagactcaatatccaagagggcagagccaagcacagagtgaactgcccaccagaatgaagcccagaccatcatgtagagcagaaggacaggcagaaaagcaggcctcaggtgtgaccctagaggtggcatatcctctggcagctggtggacaggggcgaggtccccagggtgagaggcatggagagggtgaggctggagccagtctgaagtggaagagcatagctgcccgctctggagctgtgtccacagcattcaaaaggggagtccaggaacagcagttgcccatcagtgatggagggagtggtgtggaggggctgcacacagggctgtgctatacagacaagaagcaaataagcctgtgttaactgtccccagaaggagagagggcaacacagtcagcattcagagggatcacctcatcttgtgcctatgttttttgtttctgttgtttatttaagagacaaagtctagctgtgttacccaggctagagtgtagtgtggcctgatcacagctcactgaaacctcagactcctgggctcaagcaatccctctgcctcagcctctcaagtagagctaattttttacattctttgtagagatagggtcttgctatgttgcccaggctggtctcgaactcctgggcacaagcaattgtcctgccttggcctcccacagtgctgggattacagccgtgagccaccatgcctagccgttgtgtctacatttgtttttttgtttgtttttgagacaggatctcattctgtcacccaggctggagtacagtggtatgatcacagctcactgcagccacaacctttcaggctcaggtgatcctcctatctcagcctccccagcagttgggactataggtgcatgccaccacacctggctaattttttgtatttttttgtagaaactgggtttttccatgttgcccaggctgatctcaaactcctgggctcaggccatccacccacctcagcctctcaaagtgacagatgctagccaccacacctggctgtatctaggtttttaaatgttatctcctcatccttgccattattgagattttgtggcatgggatagctttgccagtttggtgagtaatcttgtgactttagggaagtcattatttgcttggaggtctgatttcttaattaccttatggccccagatccaggctgtgtgtataatttattcaaccaaaatctagactgagcatttttcatgtgtgctgataggaaaattccttttgactttctagaaggtggagccaaacagggaactcttgaggmcaaggaacatgaccagtcttgggaagtttgaatcctagtgcagagtcctgtggtgaggccccttcccactgcctggccctctgtagctttcttcttgctcagagcagtggcacagtgcaggcagggcctgggtgtttcacatgcaggcatgctgtgccacttctaggggatagtccctccacatctggcagctgagccactaggtctttggagggcccagattcctttgtagaagagacctgagaggcaccatgctaagagctgggcgagtgtttgtatccatgtgccacccctacctctcaggtgaagcggaacagcacacctcccctctccctatttgggcaactcctatggcgagagttcttctacacggcagctaccaacaaccccaggtttgaccgcatggaggggaaccccatctgcatccagatcccckggkaccgcaatcctgaggccctggccaagtgggctgagggcaagacaggcttcccttggattgatgccatcatgacccaactgaggcaggagggctggatccaccacctggcccggcatgccgtggcctgcttcctgacccgcggggacctctgggtcagctgggagagcggggtccgggtgagtgctctctcaacgaaaagctggcctgtaccctctggtcaggcccrtcaaagggcagcccccttctgggctgagggatgaggtgggatttctgggtccaggagatcccctccagatcctctgtggcttgccttcartggaagggttttggctcctgggggcactgtggtgacttgggaaaaaacatggctgcatgtccccaaggaggctgatcatcccctcccctatctargtatttgatgagctgctcctggatgcagatttcagcgtgaacgcaggcagctggatgtggctgtcctgcagtgctttcttccagcagttcttccactgctactgccctgtgggctttggccgtcgcacggaccccagtggggactacatcaggtgaggatacagaccaggctctctggcctctgaccactgtggcctcctactaggatgggataccctgggccttttgaaggagggtctgggtatgctgatgggtcatctggtgtatcttatttcaggcgatacctgcccaaattgaaagcgttcccctctcgatacatctatgagccctggaatgccccagagtcaattcagaaggcagccaagtgcatcattggtgtggactacccacggcccatcgtcaaccatgccgagaccagccggcttaacattgaacgaatgaagcagatttaccagcagctttcgcgctaccggggactctgtaaggagacaaacacctagctcactgaagggaaggacagcacctacaggctcagggggccagatggggatgtccagatacttgcaaagggagactgagtgctgtctttcaggttgacaccttcrctgggtatgggacactgcaggctgggatgaactgggccttcctgagtagttstggggctgtgggaggaaatggaacctcagtgtcttgctcctaccctccccacccccacttgcttcatcctgccctgtagccctctgcaatcctgcgagacggcactctgattactcctcgcctctctcccaggtctactggcatctgtcccttcctgtgtggaagacctcagtcaccctgtggcagagcccagctcgagccaggctggcagcatgagcagtgcaggtgagcagcagcaaccaacctcctgtggcctcctgtggcctgtgccaccacttcagtcattcaggactgaggccagaaggaggccttgcccagtggagcttatattccacctggggcagtcagatagtaaagaaaccaagttggatcatttcagataacaagtgctttggaggaaaagaaagttgagtatcttgacagagggactgggaaagaaggatttcttctgtgtcacttgagattggagcagtcagggaacacctctgttaagcagagacccacgtcatgagcaggagccagccctgccacacactgagaaaataacattccagacaaagggagtagcaagaaaaagctcacaaacagtaccgagcttagtccattcaaggaaccgaagggaggtcagtgtagcggcatgtcccagtgaggagctggaatgagatgaggacaagatacagcatgagcagcatgtggcaggcctgatgtccgagacgaggactaggattcagccttcagtgcactgaaggatggtcagtagggcagggcatgattggacttaggtctgaaaaagctccctggcctgctgggtggagattggacagtgtaggccggagcgggcacagggaggccagagaggaggcagcacagacagggtggtggccgcaaggagaaagactggacagattcgctgcattcggagcctcttcccttcttggggatgaagatgagtaacatgagatgggaagaacacgggtttttctagttggcccagctaggctgcctccatgggcagcatgactcctccacaggggccctgctctttgctgcttggggaggctgattcagggttgcagagggaatgcctcaccttcaaagcaggacagcaggcaggccaaatcagtctctggccacagcccatgccatttggggcccaaaagctggtcctgctaccagcaggcctgcttggtcatgtcctccttggacatttccaggcaaagtcactgctgaaagcaaggccgaggggcaggtctgaggagcagcatgctggcattccattgataagtgtgctccctgtcccctaaagagctgctgctgcatagtgtgggatcattttggctgcatgcacagtctgtgtgaccctttgacacgcttccctacaggcccaagaccactacccagtggcccagcatcccccaaacgcaagctggaagcagccgaggaaccacctggtgaagaactcagcaaacgggcccgggtggcagagttgccaaccccagagctgccgagcaaggatgcctgagagtgagtgacagcagcctagattcaacctcaggaaggaagttgggagtgggggggcctactgccctgccagctgcaggttgaaacatagcaaactagatgaaaatctggtgggaccacccaatgctcagccactaaagctttaccattttacagtggcagccgggttccatcctggcttagggaatgagtactttctggttgatatctgtgtgacctttaccattgggccggctatggtggctcatgtatgtaatcccagcactttgggaggccaaggtgggaggatcgcttgaggccaggagtacaagaccaacctggccaaaccaacatagtgagactccatctctaaaaacataataataataataataataatctggtgggactgcatgacttttaggatttcagctcaaaaatcccaccattctgacttttatcagagatttaaaagtcaagcccttttgtatttttttgccagctaagggaaaaagggaggcatgggggctgaggggtggcgctttctacctattaaaatgagtcacactcaagagaaagaaagctgagacctgcgtgtgaagcagcggggaaaaggcgcattgcagggtctgaggctgctccaggccccctgctttccgacaggctgtgttctataggccagccagtggagggcagcactgaccttgagaagcctggacagagggctgtgctgtgtcttacttggcccagccctgcctgaggaccagtagacccagtctgtcatcatctttgccttttgcggcctctcctcccttctcacccatcctgtggcctcagctctgcacctccctggcagcgctcatcttggaagcctcctgaatgtcatcaaaacactggcttctcctttcccaagggaggaagggccttttatgccactcttggggaaatgtaaattcctgtcccctctgagtcatcatctcaagctgttccttatgcaccatgtcttcgtcattagattggagggtgatttttctccatggagctgataggttctttttatcagatccctcttacttcagggccaggccgcagccatctggtttgagtgtctggatttgtgtgctcactgagatgggcatttgatgcctgcacccttcacctttcctgggctctttgacatagacattgctgatggacagatgtgtgctatcttgttcctgggagtaccagcaacctactactctctcagttatctcttagctctgtgatactaagcaaagttcatcctgtattacaaatttggaacttgccaggctgacactctgattttcggatgagaagaccaaagaacagagaggttaaatgtctgggtcaaggttgctcagtaagctaatggtgtccaattcaacatgaaattgttgccagcaggtgggtgaagaagggggagcattaaacatataaaatgtgatgtgctgtccatccataaggattgaacagtctgcttagataaaaaggaacaataacctagaattcctggacaaatgatacagactatacaagcttagcagaaggctgctggtgtggtctggaacaatcagggaacatatcacagaagtttgcgctagggggcctgaaaagtgaattggattcaggcagtgagcagggcgcttaggacaagaaaaacagctgaaggtttatgtgatcttgtacaaatgacttaactgctatgggactcagtttcctcacctataaattaggttgctgttgcaagaattaaatgattaaatctgggccgggcgcagtggctcatgcctataatcccagcactttgggaggccgaggtgggtggatcacctgaggttgggggttcgagatcagcctcatcagcttggagaaaccccgtctctactaaaaatacaaaattagctggcatggtgacgtatgcctgtaattccagctactcgggaggctggggcaagagaatcacttgaacccgggaggcagaggttgcagtgagccgagatcgtgccattgcactccagcctgggtgacaagagcaaaactctgtctaaaaaaaaaaaaagattaaatgtgtatgtgtcagctagaaatgtgggggtctattaataatagctcaattactgtggctaaaacaaataggggcttatttttcttacctaacaaggggcccagagatagtgttgctggtctgggcttgggtggcagccccagcttcagccatcaattcttgatcaaagaggaaagagaagggacagcaagggcagctgcactccttccgtacacatgtcaagagctcatgttttgccagacaccattccaggcattgagggtatggttgtatacaagactggcaatatcacttcccccttgggtgcatattagtggaaggagacagacagtaaacaaataaatatttaaaatttaaagaggccagccgggcgtggtggctcacacttgtaatcccagcactttgggaggctgaggcaggtggatcacgaggtcaggagttcgagaccagcctggccaacatggtgaaatgctgtctttactaaaaatacaaaaattagccaggcgtggtggcaggtgcctgtagtcccagctacttcggaggctgaggcaggagaatcacttgaacccgggaggcagaggttgcagtgagccaagatcgtaccactgcactccagcctgggtgacagagctagactcagtctcacaaaaaaaaatttcaggaggccatcagtgctatgaaaacaataaaataaagttgagtaagaaagtaaggtcggggcacagaagaggctgcagttctgtattataagggttgctggtccagggaccatacttggagaatcactgacttagaccaatcataatccattttctgggtgaagcccattgcctcctgaacacattttaggttctgttaaccaggaagtgtggatactggtagacagctaatggtgactgctttataggcaagacacttactcaagtgtgtgggtcatgagtgcttggwaagcagtagttattattgtaggtattgttattattgtagaggacacaaggttacagttgggtctgattatggagggttgtaaatggcaggcacatgagtctgctatgtactctttgggagtgaagaaacattttggaacaggaatgatcaaattggcattttgggaggatgaattaggcattgggctgggacctgcagaggaacaggttggggagagaaagtcagctgagaggcttgacagtgattccaagggaagacatgacaaggatgcagaggtaaatgcccgtctcttgccctggagtccagaagattgtcagcctactgggattttaaggactgattcttgaggtttactctgccctccactggtggctcagtggggagttaggccaggctagactgtgaaggttgggggtgcagaggtcagaggatctggggtggtgcagacttccctccaagacagactagggaggaacagctgtgttctttggaaatcctgagagaagaagagtacaccatgtctcaccatgtgctggcagaggcacctgggcctaaagatgcttagcatcctcagctgtaaaatggtgataatagcatcttgtcacctgccctacccatcgaaaaagtctttgaatatgtaaaatgcactatgcaaatggaatcacattatcatcttgcactttcttctctgggtgtctttgattatgttggtgttacttcagtcagagccagcaccctaagctgaatggaccacagagctgtggctatgtagcccaaattggtatcatattatattgggttgggggaggggagtggcagggagacttgcccctctttcctccatttcctctgtmatttttaattgtgtgactttgggctggatccatagcctttctgccatgctttaggtgtaagatgtgaatagtcattcttcatcagcctgaaggctacatcctgggccttttgaggtctcctttagctctgagctctatagttctggattctgtttttctaatgcctcaggcctgtggcagtgtacagggtgtacagtcacttaaaatttaaactgatctggtaggaaagcatggcctccaatcagtaggttctacacttacctcagatccacaccagctatctgttctgcattaagttttattttacagcattcactaaactgaaaaacaagccagcccccaaatagctattgtttcaaatggttccccataatccccaaagctgctgactgctccggattccattagccttgaattgtgtacagatttctctcattggtccaattattttgccatggggagaacagctcacgtgttccatttgcccttctgctggtacagactgatctgtggagagaagccccactgaatacaaaaggttcccggccaaggatcacctcttcccctcccccgcgggcttttgttagctctgcagtaagcctgactgggtagatcatcgagtaaaacctgacttctggattctccttgatgtctttttgacactagtttagttgtatactctgtccttgtaaggtgaaaggcactagcaattggtaaaatgctaaatagtggaagtgaaggcagtgtggcattggccagagagccctgcattatactcagactagtgtctgcatcccagacctgccagcattacactcaaactagtgtctgtgtcccagacctgccacttgcctcttgtgagactccacccaaatagtctcacctctctgttcctgcctttaaaatcagaggcaggattctctgttcctgcctttaaaatcagaagtttagactcatatcccctagcgctttccctggcacttcataagtaggcgttgactgatggctgtcccttccactttcttgcatgatctgcatgctgtgggaagggtaaaggtgtggttgacctgaggaatgagattgagctcagagcttcagctctctcccccatccaggcccagctgtacttccctgaccctcacttggaagcaggtagcgaaccctctgcctttctcaagctcttgggcactgtgccttgcccaatatgatggggagagggaaacattgagactcggtgacagtctgcaaacaaagtttcctccaaaccatcagctgttgtggaccctctgccagcataaactcatgcctgcacacgtgcatccacccctccagggcgaggagcatagggacgggcagacttatacacttgggttcttgatagcatctaatggatgggaagggatgtgagggcaaaggtacccaggaggccatgctaactaacattgggttgcagagggagacagtcgttaacgctttttgttctagccgccactgtgtttcttgtatcaatgacaggttgaaagagttggacaactaagagattgatttttcagtgaatgttttatgagttgattttcccttggtgcctccccttggctgttcttcccttccctttagtcctgctatcatcatttttttgcaagacctcatttgatttccccagacccctttttctacagacgcatgccctagcttgaggacaagagcatggcaccaactagttatctgctgatcaagcagctcgagtaactagttgaacaggcctttggctagctttgtaggcgaggccaagttggttcttctaaaccttggttttctgcattggtagctttgaaaccatcatagagggacttgggtgactagggcttatctgagtccaggacactgccccctcccttcatgagcctgcccaaaactaactggtgccgaagtcaacatatgtctgaattgttatcattatatccacctgactgtacctcaccctcttatcttctaagcttaggcattggttcttaaaccctgtttgggttactccccactttggaaagtcgatggaggatggaacccatacccagaaaactgcatatgttcacacacagagaggaatgtgcacatcactccagaggctccatggactgcaccaaagcctatccttgggctccttaaggcccaggaaccccagattaacagcagttattctaaggaatcttcatgcactctttatcttcccccatccctgaaaatggataaaacacacacaaaaaaaatggaggtgttgggcaaggaggaccttttgtggtatatcctgcaatcctgaaagttttctatttcagaagaatagccatctctttagtttaacaacaggggccagagagagccctgtgtgtggagtatatactcagaatcagcacatttcaataaatacatgtacaccttaataatacatacatttgtagcaaaaaaatggctaggttattatagtacaagcttaaagggaaaaattattgaaaataacacacattttaaagaataaaacacacagccaggtgcggtggcttacgcctgtaatcccagcactttgggaggctgaggggggcggatcacctgagatcaggagttcaagaccagcctgggcaacatggtgaaaccccatctctactaaaagtacaaaaattagttgtggtggcaggtgtctgtaatcccagccacttgggaggccaaggcaggagaattgcttgaacccaggaggcagaagttgcagtgagccaagatcgcgccactgcactctagcctgggcaacagaacaagactccatctattaaaaaaaaaaaaaaaaaaaaaaaaaaargtcgggctcggtggctcactcctgtaatcccagcactttgggaggctgaagtgggtggatcacctgaggtcaggagttagagaccagcctgaccaacatggagaaaccccatctctactaaaaatacaaaattagccaggtgtggtggcacatgcctgtaatcccagctactcaggaggctgaggcaggagaatcgcttgaacctgggaggcagaagttgcagtgagccaagatcactccattgcactccagcctgggcactaagagtgaaactctgtctcaaaaaaaaaaaaagaataagacacacagtactgacctatacaggcacccactcttatgtctgctctttattttgcccagcttccagataaattatcatcagataaaatctgcttcagatttaccatgcggccttaaaagcatcgcatgatactgaatccttgtctccaatgtctttgactttaagagcattttcccttttctaataacagcttaattcacatgtatgtctgttggatattagtcttcatgctgccatgttgaatttcttctaaaagtcttcttctctaaaagtcttaatgagcaatactawcgtatagagattacttgctagtaaaaagacagatttgagaatcagacagatgtggatttccttttttggctctgccacttatgaatgctgttgtcctgggcaagttccttctcctctctggtttctgttttctcatctacaaaaatggagggcaagcttcaaggttactgggatctcaagttgtgttagtctgctcaggctgccatgacaaagtaccacagactgggtggcttaatcaagagaaatgtgtcctctcactgttctggaggctggaagtctaagatcaaaatgttgccagggttggcttcttttcttctgaggctcctctctgtggcttataaacagccatcttctccctatgtcttcacatggtcttccctctgtactgtctgggtctaaatttcctcttcctttaaggacaccagtcatattggattagggcccacactaatgacctcatttaacttaattacctctttaaagaccctgtctccaaatacagtcaccttctggggtactgggggttaggacttcaacataagaattttgtgggggacagaattcagccacagcacaagtgtatagtacctgacccacggcaggcttagtaagcctacttattgtctacctcacccacatttaaactgcacaaacttttaatgggacgctgtgtgtctctgtagactcccagacacactaaacctatttaaacagacaactcagcattgtgacaggcgcactctgtccttcctttattatcagggatgaagctgtttcttctctttgccccagattccggatgtcataaatctttaaaatgagtcatccttgtgtctcctctctccctcctgcccccacaatcttccagcactgtgccagggtgctttcatctatatgtggaaatgtgctcacctgctgattgtaaactcagtcattgccttactcttcaaaattactggtcccagcgggcttctcttccagccattttttcctgattctccatctctggcagcagctgctgtgccttgattcagaagctgcccttgtcatatctgagcaagtatcccccagggcttcacgtgactctcacatagccttgtcctcctcctcctctgctgtccgcagccctgggtggagggcctgcagtggggagcttgtcctgcatcagcacctcagaggggcagtattccctcatcccagtggcatcccagcaacaacctgtccccaggtaccgtggccctttcagctcactctttcagctcttctcaggtcccgctctgaatgtccccagagaagcagccagaggagcttgtgtccctgggcaactgagcagcctcctgaatgctccttttgcacttgtttttctcttccagctgcagagcccttgctccgtgagcaaagcctgggtgcccaagcagccaccgcagcagcagagtacaacctgcagagaagctgatcaccgggcagagatagagcgagcatgtgtgtgtgtgtgcgcgtgtgcagaggagggagtggtgtgcctgtttgtgtgtgcatgcatctgttgacactcatgattctgaatgttgcctgggctgggggagtacctgtagcacgccagtgctgtttcccggcctccagacacaaggctcgaggttatggcagtgactttcagctgagacctgttcctgcaagccagctgccttgtctgaacagaacgtagtggtaggaccctagctgggattctggcatctgcctccctagacctccttccctccctcctcacgtcaggctgtggagcaggagcacagcagttctggctgttgtccaaagcatgggattctggaggcagccagagccctgctgagttcctgctttctgacctggaggctgagcaggccggagtggatggatgctgtccagacgtagccacctggcctctgtttcttattttaaaattctctgctactgggctcagtcccaggcccttccttgggcttctgggactgagcatgaggccatagacagatctaaaaagtttccaccaccctacagaagtacacacagatacctgactggtgtggggtatgcctggtactgtaataggagcctaagacagcacacctaccttttcaggatttagaacctaaaattagaaagagaatcccagctgtcattgttccttccccagaagctaagagccagcctcagagcctacccaggagctgtgaaggggcaagggtcaaactgactcactctaccaggaggagaccaggttgcagtggcgtaaggccccctggtttctctggccacactccaaggcaccacagtgctgccagtgaggacagctgacacccagccagggaaaccattctagtctttattctgttggcttccagggcctgtcctggacttgtcagcatccagactgccatgtcagctatcccagtagctgagctccaaggactcaggcagagggactcagggatggggactgccaggggcagttggcaaaagtccaagtagagattacacccagmacaccattccttcyaggagcagtaggtgggaggtttgacccagagaagccaatccttgcattccaggagtggcctgtgcctcccacctcttccttcccactgccaaaggcctgtgttgagaaagatgtcatgcaaaaggacgacggtggccaactaaagcaagtcttccttccaccctgtggcctgcacttgagccacaaagtgtgtgtgtgtgtgtgcgtgtgtggtacgtgtgtgtgtgtgtggctatgaggctgattcctgtttggatttttgtcctcacgtgtatcattaagctggcctttgggccttttcctttctacctcccctgtgacctttcctagcctcagatctgttaattcttttggccccagccctgtccctcactgtcctctgtccttggaccagaaccctggggtcagacccatctcctgtagctgtccatcacactgacaggcttcttcctgagatatcctcaggttttctcagccagagagctgcctttagagtccaactgttgtacgtatgtcaccttcactagaaatgtcccatcatcgtgggaggggagcagggcacaggggatggtgtgcattcagagcattgggttgggggcttccctgttccctcagccccagtcgagaggaaagagaatcgggccactgccagaaagagagtcaagcaaacctggaagggcaaatctgagagtgggaaggccaaaggccgaggcccagatttagtattcactagcagcgccttcgggtagcaggatgattccttttcctgcctgtctgctgctggctctcttccctaaggtacaggttggcaggaccacctccgcctacttytccaccatccctagcatgycagcccgttcccagatcaacctgccagtggagtcaggcagtgcactcctggagccaagagggaakggcagggtagagagggtatgtccagtascctggagctccatggtggcttcatgcctcccttctcccagctcaggtggccctgagggctccctcggaacagtgcctcaaatcctgacccaagggccagcatggggaagagatggttgcaggcaaaatgcactttatagagattttctattgctgggaaggtgtgtttctcccmcaatttgtttgtgaatattcacttgttttataaatgtctgacctgtcttgagtaagtttgtgctgtcgtcaatcttgtgggaggcctgggaaccagggttttggtaagcctgagcctgaatgaagctgtcggccaccccatcttggttctgtgggagtcaggagcctcctattcctccttaggaagggggagcagccagagcagactggagcagcttggtcaagagttggtccagagcttggtcaagagttgggggtcaattggccaaaatagtacagagcactctggcccagagtgagggtcctaagtgccatcctgcagtgccacccagccttgcagcccacttaaaccccctcccaggctgggggtcagtcagtgcagggcctgctccacgccctcaatccatcctttaattcaatgcagccacttaagctgcagcctgtggtgaggaggggatgcaggctctctggctgtgactaggtggttgagatctgcccacagccaagcctagggcgcctggatgctggctttgtctcctggccagagaatggcccctctctgtgcagtgtgccctgcttccatgctaggggatgctagccttggactgaaagctttattagctcacaccccaactttctgggaaggggcccaggcaaggcccaagaatatcacagtctggcctgcacagagtgaagaaggagaaaaggggaggaacctgccttgggaacttgtctcattcttggctctgctctgaagctcctgctggcctccctcataccaagacctgggcctgcctttccttcttgcccttctggcttctctctaataatggctttgggttggtctttggagctaagatacctttgctcttgagcaaaaggttctggaagagggagttgtcctttacatccacccctgacctgctaaggatgttccctagctgaggcaggtctacattctaaggaacgattagtagccatgatggcaagactgctttcctgagaggaaaagccaggcaccatggcagcagatgattaccgtgagggcccagtgaaaggggcctgatcacgaaagctgagaaagtagtggccacccctctgggccccagggacagggaaaagagaagcagccatgacctttggctctaggtattgggatattctcagggctggtggtcggaggttgccttctgcacggaaggtgcctccagctccttgctaggtgccgcactgaaggaaaggggccagcatgactggtcggcagtccagatttgcaaataggactccacgagttgtggcacagtttgctctgcacgttttctgccctgtggacagggtctctagggttctctcgagagaccagagaagccaatgaggtttgaccagaggctctacgacccagcaaagctaaggccctagccttggcagtccgtactctgaaataactcaatcgggaaactcagggacttgaaggcctggaagcccaggaataacaccctctcgagggagagacaatgaggaagaagccatggccaaagcctagcagggatggaggtgccagagggaacagaaacaaccaaaatgatcccaagaagtcaacagtgggaggagagggaaaggcgccaagtcttagaatgtgtgtctgtgggtgcagaagaggggtgctctgcaggaaatgcagttgaggcgctaagaaggagaatgctgggaaggtcctggcgagagaccgagaagcctggagggctcaattcaccacgagtagctgtttggggctgaagagagatttgggtcaatctttagagaagacagcctctagggagagtctttgggagggtcccctcaaggtaaagggacaggactggggtgagggctggatcccagcgcaggaggtggagtgtttctgggtctcaggcaacacatttgtgttacgttacattctcacaacaaccatgagagggactgctattgtcccatttcacagataagaagaccaaaccttagtgctctgaagtcactaatgcaaggccccactgcccagtcacttgtggagccagtgaattcacaccacctgactccaaacctgtacactttaagagcccactgacatcctctcctttctctgccttcctccacgaccctccttttccgcctgccttcttggtctctgctgcggggggccaacctggaccttggggtccagtgtcctgccattagtcatctgatacccgggcactaagcccaaccggagggacaaagcccacaccggccacggggtggaggagagtcgatgtcggatttagggcggggctgaaccaagcccagggccgcgggggccgtggcttcagcaccgcggagagcgccatctccgggggcggggctggcggggtgggggcggggcctgggcggggcgcgcgagaccccggccgggtcccgggggcgcgcgcggggcgctctcgccagtcccgcgggccgtgcgcggtgctgtgccgcgccctgccagacacaggtgcgcccgcctagcccgaactccgcggcggcggctgccctctcgccgcgcctccgcctccttcgcagccgccgcctcctccgcgccgcgctccgcccggatggccagggctgtgcccgagaatggcggagcgagaaagcggcggcctgggagggggggccgcgtccccgcccgccgcctccccgttcctggggctgcacatcgcttcgcctcccaatttcaggtgagagtccccggccgccgcgcgcctcgcccttcagcggggactgatccgcattggctgccctgcccgccccccaccccagaacctcgggaacccgggaacgaaagggctgcgtgggagtggggtctcttcccgggacagagcccccctcagaagccccgccagcctcaagtccggactggtagccgttgcatgttcacgaggctgttccctccgccattcctggtcctaggctgggaggtctgcgctggaattggaggagggggctcggaggcctccttctccccaacctccgggctgcggcagggtctggggtcggggttgcgatcccggagcgggcaggcaggctgcatcttagcctgtgaatagagctgggaacagcctggaggggcgcgggtcgcagtttcctggggcaacgacattgttggtgctgggaggaggatgtttgagcccctccccgagccctgcctggccagatgggcctacctgccaggcctggcgtggccgggcccctctctggattgggcagcaccgacctaggcaggtgtgtctctcagggcaggcgctgaaggctcagcctcaaccaggggaatcctaggcccggctgcgggaagggaagtcggctcggctctggagtagccagggccagcgagggtgtcgaggggatccctgctggggtaaatacccagaaccctgacctgagctcctattccaccacccccaccccccaatctggtgttaggcccgatgcatttcagagaagtgaggggtgagtgttgtgtggaggaggaatagatgtacctcccccataattctgaaccctagttggtggggaggaagaggccgaagtcactgctcccggcctagagagggaggcttagacataccccattgtttccccatctcgagaactggcgccttcccctctcctggggcaccaccccagccaggctccagctgggctgtggtgccagcccctcctgggagcaaggggtcactggctcccaggtcctcaggtgggcagagacccctggggatctctaatagcatcatcaaactcagaaaccttccctgaggccctgagctgagctggaaggaccagagggggccagatggaggaggccaggcctgaaggctccagggctgcagctctctgataatgccttagactgaggtctgagactccacctggcatggtgcatgaggcctccatgcaaatactgcctccccacctggaggcctctgcagtggaagcacatggggcttagagggacctgggttcaaatcctagctccactactttctaactgcatgacccaggcaggtttttgtcctctctgggtgccatctgttaagtgggctaattaatattgattcttgcctggaaaggagaaaaagcacatcaggtcagtgttcaacaagtgtcagcccccacactagcagacaacactacggctcgctgctgtccagagtgtcttcccaaggcccctcctttaaccctcataactgccccaagagagggtagtgacctgcccattttatagatgaggtgattgagattaacaaaggcagggtggctcatctggagactacaaaagagtcagagactaaggctacactgggacccaggtctgtgcgtgtttagtccactctacgtcccagccctgcctctggcccagtgggcagcttttcttcctcgacctgcttccccaggtgtcatagatgctttaatgagaggagctgaggaagcagacaccagccagtgaatgtgtggccagctctgcggcatgtgggacaagggtggcagtaggccacgaggctgaggtgtgggccagcactccagaacatggtggcctggctgcggagacaaggccagtgcgtgggaataataagcgtcagtgtctcaggccctgccggcctgccccgctgctcccaaagcccccgctgccctttctcctggcccgcctctcactgtgcttggccaggctccacttaaccctgggtgggtagatagtgctttcttgtggctctttggtggagtcatagatccaactggcctgggtttgaatcctggctggcccttcttacctgtgtgccctgacactgggcacttaagccctctgagcctctgagatgccagcactggcccctgctcaggatggtcctaagaatcagatgagataacacgtgttgagtgtttcaagggctgaggagagccgcctgtaggcagggctgtgtgtgtgcacacacacacaggcgccttgacccccagtgccactgtcagctcccagaaaataaagggggtctgtacccaaactttggtatccccattgctcagcacgggatagttactcaataacagtggtaagcgctgacatttggaaggcactcagttcgcccaggcaccattctaagagtttcctatgtgcaagagtatttactcctcccaataactgtatcaacagagcgttgttattatccacacttgcatgaagaaactgaggcagagggaggttaggtaagtggcagagcttgtaagtggcaggcagtctgatgtcagagccaccccaaaaagaaagagccctagagtattggaagagcatgtgcggagggggcgagcatgtggacctgacctgaaggggtgggagcattcgtttgtttgtggtaggttaaatacgtgttaatttttgttctgattatagctccagctgtttatagtggttggttacctttgggtatggtatggggtgagggatttttacttcttattttacatactttttttttttgagacagagtctcactctgtcgcccaggctggaggttggagtgcagtggcatgatctaagctcactgcaacctctgtattctgggttcaagcggttctcctgcctcagcttcccaagtagctgggattacaggtgcccaccaccacgcccggctaatttttgtatttttagtagagacggggtttcaacatgttggccaggctggtcttgaactcctgacctcaggtgatccacccatctcagcctcccaaagtgctggaattacaggctcgagccaccacgcccagtgtcatacttttatattacaggttgagtatgcctgatctgacatgctttggaccagaagtgtttcagatttctaatttttttggattttggaatatttgcatatgcataacgaaatagcttggggatgggaacccaagtctaaaaatgaaattgattttttcttatatatcttatacatatagcctcaaggtaattttatacaataatttaaataattgtgtgcatgaaacaaagttttgattacaacctgt

SEQ ID NO: 95287 - DNA, 18415 bp, Homo sapiens
ttctgagtcggagtttcactcttgttgcccaggctggagtgcaatggcacaatctcggctcactgcaacctctgcctcccaggttcaagcaattctcctgcctcagcctctcaagtagctgggactacaggcacctgctaccatgcccagctaatttttgtatttttagtagagatggggtttcaccatgttggccaggctggtctcgaactcctgacctcacgtgatccacctgcctctgcctcccaaagtgctgggattacaagtgtgagccactgcacctggcctcacctctgcttttcaaaacccagtgcattctttcaggactgtgacagcagtcactgggcaaacactcttgaggtagttacaatctgggaatcctggaatctgggagatctagacttgaatcttggttctgggaccatcagtgactgttctctaacctcactgagcttcttccttaaatggacagtgatgacaataagtaccacttaatatgactgtagggaggattaacaagtaaaggtaagaaaggcacttagtccagcgcctggccagtagtgaatactcagataaggtccccagacgtgtctcttgacttagggacatggagggcccaggacaatgaacaacagaccttgtgccgattcagtcatagcacaaggtgtctaacgggcagcccaggtcctcgggctggggtgctcaccctctctggggaactcaccaggggccaggcagccgatcccccatcccccacccccagagcccggctcacccagctctgacagctcgtgcgaatcggcgaatcgacctggggagagggtacagaaggaggtgtgagtgagcatctgcctcacatttcgtcttcgggtcccggaaatcccctccctacgccctttgggaacctggacgggtcttctcaagcacagcgatcactaccctgactccgcaggkaagggggccactggggtcataggtcagggcccagaaggaactgatcaaaggtcagggtggcacctgccagcaggtaactgaagccccgcactgctgtctccagctgggccgtggcggccgggtgacgagtcacgtactcctggtagcggaggcccaggagccgcagcttctccatcctgccctcggcaccgacagacccacagaaggaccgtacgacaggctgcggcgccctgcttcctgcgccctccttcctgcttccggtcttaggcccgcctcttggttgcttaacttccgcgggccagaaggctgaggacttgaagaaccggtgaaccacccttcaccccatctcttgaaccgcttcccactcgggtagcccttagcaactgagggcccaaacccggccccctactccctcaagtcattggttagcacgctctccgcccctgacccgcccagcgccgtcagcacccagctcttccgtttaccgggttggctgcccttgcgcctgcgcagttaaagctccggtaaagccgggcggcagtcagagcagttcattctagagaagggagctggagccccgagtctttccaatggaacgccgagagactcgaacggcagggccggattttaaagggctgagagatagcgggtgcttgaaaaaaggagcctcgatcagatttggggaggtgcggggcgtctaaatacagttgcactgtgtctcagcaggcgcgcgttcggccagtatccccatctccgtttcctcaacaaaggtagtgctggggaaactgaggcagtaaggagtccagccctctagtgccgtctcgatcccctagacagcacagttagtgctccggcttcggcctcagctcccgtatggactgtgccccccaaagggctcgcgcctgcattcccacatacgcgaagaaagccctggcccgggcttctctcggctcggtggcccttgggcgggagtatcccttctctgggtctcggatttcccgatctgtaaaatggtttgagggcagacttgatccttgaactcagaatcgatctcagctttctggccctcggacgcacctcgcagtcctcagctgcgcccccaagggaaggggagacccctggggagtatcttcccaaaccaagcagcctccctggaacgggtggcaccgggagatctgcggcgagtggtggagggaacgggcgctctggggaggtagcgctgattggctgcggggaaaggggcgtgacatgggtggagccgtgggccagtggcctgagggagcgggccagcggatttatggtaccctgagaatagtaatacattattttacctaatcctctccaccagatatctccagatgaagaaagcatccttttaagaacgcccagccaaaatttgagtgttggtcttttctgacctcagagactaggcggttttttttaattcattttttttaactttaattttatttttagagaccaggtctaagcatcacacctcaccaggaaaccacaaccttccttccactccctcactccaccctactccacagcttagttttcttctctatcaggtgggggattaaagctgccctcttctcacatcaaagaacgaagacccagggaaaggtgaccaggggcctgaggagaggcaaaggtcttggagaacagaggaggtggtcatgggcatcgtcgacatcatttctggccacgctctgggttccaggcttgcttgccctcctcccagcagccccaagttgctatgaactgttcacagatgggaaattagggcccaataaggaggggaaaggatttgtcccacatggcacagcaaggcactggccaaagaggccacagcgcaggtctccagtggcagtgccctctctcctactgcccacagcccacaaaagctgtgacatgttgaggctccttggtcataaggccagttagcaactgggattaggacctaggctcagggccctcaaggtgaggctccttctcccttcctctgccccaccttgttttttgtttgtttgtttgtttgtttttgagacggagtctcactgtcgcccaggctggagtgcaatggtgcaatctcagctcactgcaaactttgcctcccaggttcaagcaattctcctgcctcagcctcccgattagctgggcctacaggcgcccgccaccacgcctgactaatttttgtatttttagtagagacgaggtttcgccatgttggccaggctggtctcgaacttctgacctcaggtgatccgcttacctcagcctcctaaagtgctgggattataggtgtgagccactgagccctgcagggccctgctgtgcaccaacaccttagtgaacttgttcctcaaacctccagtttggccactcctccagccctccctctgcagctgtggagagggtacagagagagaatttgaggttcttcagcactccttgggctggaggtcctgattctgagagcaaggtgtggaggggagaggggcagactccccaggacagaataggaaggggcttgggctggaaccagtttcttctccctccctgcagaactgggaaggggagcatgggtctagccagcttggcagcagcagggctgcctgaatttcctctctagatcccaggccggattaggccccagagacaaagagttgcggtgtgtgcaggaggcccctcccctgctccctggccccctgcctgggcttggccgtctttgttgggctggaaggacctttgggcagattgagccgtatcctctctccttcagtttgccccaagtcacaggggaagagaggtagaccagtccaacatttacctacgagagtaccagaggcccagagatggagcctcactcgtctaatagggtcacacagcaaagtcctgggcagagctgggtcaaaatgggtcttaggccaagaggaacagcacctgtttatatgcccatacgtgtccctctttctccctccacgcccccagaacaaccccttgggggcctagcaggtatctcagcacttcagtttccctgagtggtgaggttgagccagaagaagggccaacattgtgagtgactacagtgagatctgcagacccagcttcctgcactgactcccccagcccctttattgaagactcatcctgggccagcacccaactatggatcccatatggtgtttgtttgtttttagagacaaggtctcactctgtcacccaggctggagtgcagtggtgtgattacaactcacagcaggcttgacctcctgggttcaggtagtcctcctacctcagcctcccaagtactaggcacatgccaccacgcccagcaatttttgtattttttgcagtcatacagtttggccgcattgagcaggctagtctcaaattcctgggctcaagcaatccacctgccttggccttccaaagtgctgggattacaggcataagccactgttctggcctggtctcacatgtttaacccccacaaaccgtctctgttgagggtcctggagagggaatcacatttccccaccccagctttaggctacagatgaagatcagggaggctggaggctcaagctccagacgcctgagtggccagtgcatggcccttctcaatttctgggtgcacaaggagccaccatcagtctccatagcaaccattatccctgccctccagagacccaaagcctgaccttccccatctcccagagaaagggggtctcaggttgggctgctttccacagcttcttttgagtttgcctcactttttgcagccagaagttgggcaaaggacacagcctgagccccctttccaggtcatgggaggggagattctcattccaatccactttcaacaggtattgagcacttggtatgtgcaggccctggttgggcactggggactggacagacaaggttccagtccggtgagcagcttacattctgggagggagacctgcaataaacaagcaaacaacttcaactttccatgagtgctagccagccctgggaggctccgctgccagaaggaacgtcaagggcaagtcctggggcgggagacccttccggaggaggagcaagaaagctgcttctgcagcgcagagcctggggaacggagtggggccgcttgagacgggaggggccggagggtgttcttgtctaacaggtcacttaaactctccgggggagaattagcccgcatcatgggattaatcgagggtgattaaatccttagcacagggcctggcacgctgtgctggtttagggtccagagcgccccccacccattccctggcctgctatggggtgcgcgggggagagggaggaaagacgagctccaggccggtgcgcccgggcacaatcacgacgatctggacaagagtggggatccccggccctgcccaggcagcctaggccgcccgcgtctggggcccctcgccagctcccgggcgggaggcggccttcacaagggcgctttgtcctggcggcgccggcagggcccggccgggccacctggactgagagtgggggagtgaggcgaaggcttcaggtgctccgcggctctggcgcaggtgtcggccggctccgcccctgtccccagagcaggtgtcccagaccctgcggcctgcattccggccccctcctcctccctcgtgtcgagctcccgcagtgtctttgatcccgggcccggggacactggcccctccccttggggagtgaggggaggagacgcggccccagagcgggggcagggcagggggtcagggcaggtagcggggcccgggccttcgcgggtggctgctcccgctcccccagccctcccctcgtcctggtgggaaactcagcccagaagggggcttcgggggctcctcgcgggctggggaaccgtcggatgccggcccaaggggcggggccaggaccccgggggggtcaccccgccccttcgcgctcagccccgctgaggtgaaacctgagcccaggtcgggggcgggaccggcccgcgcctctcccctggttcccgcaccctggccggcggctgcgagcgcagggcccagcccgggagccgctggagcaggtgagggaggtggctcggcgcgagccgcacaacccggccgtcgggccccgccgcccagggctgagtctcccatctcgcccctcggtccgcagggcctgcgatggagcctgcagccccgggtcgcgtccctccctgagcgcccccgtcggcggccatgctgccccgagggcgcccccgggcgctgggggccgccgcgctgttgctgctgctgctgctgctcggattcctcctgttcggtggggacctggggtgtgagcgccgcgagcctggcgggcgagcgggggccccgggatgcttccccggcccgctcatgccacgtgtccccccagacgggaggctgcggagagccgccgccctcgacggagacccgggggccggccccggggaccacaaccgctccgactgcggcccgcagccgccgccgccgcccaagtgcgaggtaggtgcgcgcggccctggcggcgggagtcctgggggcgccgcccccgagcccggcctcttggacatctgcgggaatcacagtacctggcgtctgtccagcactggccagccggctggggcgcacctcgaacgtgcagctcctctgctcccgacctcatttccccatttgaaatgaagggttggctcctgctgccccctccgcacactgttccgggctctgctgcggggtggggcagctcaacatgggtcctcaccgcctagcggagaaggggggcctgctgccgacctgggcgtccctccccagctcttgcatgtggccatcgtgtgtgcggggcataactccagccgagacgtcatcaccctggtgaagtccatgctcttctacaggtacagccaggtgtccgtggaggagggtcaggagtggggaagggacaaagcccgggacaggctgctggtctcagagcttcagcttcctcatctgtgacgcggggacagtgtccccttcctcccttagaagggcagttgtaagaacatcctgccgggcgcggtggctcacgcctgtaatcccagcactttgggaggccgaggcgggcggatcacgaggtcaggagatcgagaccatcccggctaaaacggtgaaaccccgtctctactaaaaatacaaaaaattagccgggcgtagtggcgggcgcctgtagtcccagctacttgggaggctgaggcaggagaatggcgtgaacccgggaggcagagcttgcagtgagccgagatcccgccactgcactccagcctgggcgacagagcgagactccgtctcaaaaaaaaaaaaaaaaaaaaaaaaaaaaaaaaaaaaaagaacatcctgagccgggcgtggaaaagctctttgcagatggcgcttccatctctgcgcccctcggggtgggggctgtcccatgttgctcctgctggggcctctcaggcttcctctttgcccacccaaaaggaaaaatccactgcacctccacttggtgactgacgccgtggccagaaacatcctggagacgctcttccacacatggatggtgcctgctgtccgtgtcagcttttatcatgccgaccagctcaaggcaggggcycagcccttcccccctcccctcagctgtgtccaccgctctcctctctccaagacctggtggggttggagaagagaatcatcagtcccccctccacctactgaagcgcaaacccctctcttttgggggtttacyccctctcctctgtgtcactgcaagcatgtgttmtggtgctcataggcccctctctgccatctcatctcctgcctttcccccacacagccccaggtctcctggatccccaacaagcactactccggcctctatgggctaatgaagctggtgctgcccagtgccttgcctgctgagctggcccgcgtcattgtcctggacacggatgtcaccttcgcctctgacatctcggagctctgggccctctttgctcacttttctggtgagaggcctgggagcctgcctggcctgcccaggatccctgcatccagccctgagcccaggtcctgtggcagcttcagacagctcccttatgccctcccctcccagacacgcaggcgatcggtcttgtggagaaccagagtgactggtacctgggcaacctctggaagaaccacaggccctggcctgccttgggccggggatttaacacaggtggggacagtggtgaggggaggcaggcggggtggtctgctggtccttgggcccctggggctgggtggggcaaagaatgctaggaagtcccccaggaagaacattgctgtgaaaagaaccctggatgaagagacagacagcagttccaacagtcctgtgtgtgctggatgactttggccagctctcgtgctccctctgagcctcagttttctcatccattaaatgggggataattttaacagccctgggatcaccaagtgtgagaaggccatggatgtgctctgtaagctggacagcgcctcctcttcacccccgaggattgactattgacaaaagtagtctacgagcaagctgggtgcaatggctcaggcttgtaattccagcactttgggaggctaaggtgggagaatcgcttgagcccaggagttcgagaacagccttggcaacatagtgagacccttgtctctacaaacattaaaaaattgaccagtcgcagtggctcacacctgtaatcccagcactttgggaggctgaggcaggcagattacttgaggtcaggagttcgagaccaacctggccaacatggtaaaaccccttctacactaaaaatacaaaaattagccaggggtggtatcacgtacctgtaatcccagctacttgggaggctgaggagggagaatcacttgaacccaggaagcagaggttgcagtgagccgagttcacaccactgtactccagccttggcaatagagtgagactctatctcatacataaataagtaaataaataaaaaataagtaaataaataaaaaggataggtgtggtggcatgcctgcagtcccagctactcggtgggggttgtggtggggtgctgaggtgggaggtttgcttgagcctgggaagtcgaggctgcagtgagtcatgattgtgccactgcaccactccagcctgggtgacaaagcaagaccctgtctctaaaaaacaaaacaaaacaaaacaaacaacaacaacaaaaaacaagtagtccatgatcatgtctgaacagtcagaaaataccaatgtcaaaaaacaaaggacaccttcatgacccccatgtcccccaggagctggtcgtcccaggtgggcatgacagcatctcttcattggcaggtgtgatcctgctgcggctggaccggctccggcaggctggctgggagcagatgtggaggctgacagccaggcgggagctccttagcctgcctgccacctcactggctgaccaggtctgaggaagccttgccgggtggggtgtggcaggctgggggctgggatgtgatgggtgtctctgctcaggacatcttcaacgctgtgatcaaggagcacccggggctagtgcagcgtctgccttgtgtctggaatgtgcagctgtcagatcacacactggccgagcgctgctactctgaggcgtctgacctcaaggtgagtgggacaagaggctgtgtggtggtggggggccatggatggagacttctgctccctgctcccatggccccaacaccctcctgggtcccaggtgatccactggaactcaccaaagaagcttcgggtgaagaacaagcatgtggaattcttccgcaatttctacctgaccttcctggagtacgatgggaacctgctgcggagagagctctttgtgtgccccagccagcccccacctggtgctgagcaggtgagaaggagtcaccttcccctgcccctctctgctttggtgggacccagccttgtctgggggatgtgttgttctgccctatccccggtccttgtcaccccttgccccctcagttgcagcaggccctggcacaactggacgaggaagacccctgctttgagttccggcagcagcagctcactgtgcaccgtgtgcatgtcactttcctgccccatgaaccgccacccccccggcctcacgatgtcacccttgtggcccagctgtccatggaccggtgagggtgcagagggcagcccagggggtatggcatgggctggggttggacacttctgagaggaggttccatctggcagcctgatgctgtggtagtgagctacctgtccctcagggagttccagaagttggagacattggatatggtggaaagagcttgggctctggagtcattcagatgcccggagctgcccctcggtcgctgtgggaccatgagcaagtcttcatatctctggcccctagttttctctctcaaatgagaaagtacccacctggtgggggtagttgtgaagattcaatcagactggctctaaaagtatttgaagggtgctcagtaagtcacttgaggaggtggcagcagcagctaactggggaggtttgccaggcctccctgagctcctgtgcaagaggggcagagctgtgctgacctccctctccccataggctgcagatgttggaagccctgtgcaggcactggcctggccccatgagcctggccttgtacctgacagacgcagaagctcagcagttcctgcatttcgtcgaggcctcaccagtgcttgctgcccggcaggacgtggcctaccatgtggtgtaccgtgaggggcccctataccccgtcaaccagcttcgcaaygtggccttggcccaggccctcacgccttacgtcttcctcagtgacattgacttcctgcctgcctattctctctacgactacctcaggtgggcctgcaggcagagaggggaacaatatatggggtggacgtggacggggcatgygtgggaccccaggcttccatgtccctgctcctttctgggcctcagtggcctctgtcaattggggtttgtattaggctgtttctctgggctgtcaacagggaggccagggccggcttcaacagcagctccacctgtggttgtgcccacccgtcgcatcaggcaagatggcccatggtggtctagtcctgtggctaatgccctgatgagtgtcactggcccagtcctagatgccccgctcttctcccctgctcatgggtgctcctcctcagggcctccattgagcagctggggctgggcagccggcgcaaggcagcactggtggtgccggcattygagaccctgcgctaccgcttcagcttcccccattccaaggtggagctgttggccttgctggatgcgggcactctctacaccttcaggtaggagaggctacttctctgcccactccactcacttgcccacactggcccccactacccacgagctcctagcctcagcctggctcccacccgaccctgctgcacaggtaccacgagtggccccrmggccacgcacccacagactatgcccgctggcgggaggctcaggccccgtaccgtgtgcaatgggcggccaactatgaaccctacgtggtggtgccacgagactgtccccgctatgatcctcgctttgtgggcttcggctggaacaaagtggcccacattgtggagctggatgcccaggtgaggagggcaccttgctgcctccacctttgactcgagcacctccaggtccagggaactcacgacacctgcatgggggaccacaccactaggcaacactgttrgaaatgtcccccttctgtggaattaaaataatctgccctttggcccttgctttagctctcaggggctacagggtaagcctgttctctggagctgcaccttccccgcaggccaggcaagccaggcagccactgctcctctgccccaccctgcaggaatatgagctcctggtrctgcccgaggccttcaccatccatctgccccacgctccaagcctggacatctcccgcttcygctccagccccacctatcgtgactgcctccaggccctcaaggacgaattccaccaggacttgtcccgccaccatggggctgctgccctcaaatacctcccagccctgcagcagccccagagccctgcccgaggctgaggctgggccggcgctgcccctcatcttagcattgggcagacaccagggcaacctgccctccgccatccctgctatttaaattatttaaggtctctgggaagggctggggcagagcatctgtggggtggggtcttccccttgctgctattgtatggctggggactggtctctctctgccccagccagtttggggctggttcccccatcttgaattgtttatccctttttcataattaaagttttaaaacatcttttttgtgttcctggtttgggggagcaagggcactctggggctagggcgtcagtgcacaagggaggtgctacatccagctggggtcacaggagggcctgggcccttaagggcaagcacccccccgccccccacccccagacagccagtcagggagggcagaggctgggactggaatgtgtcctgcccaccctcccctgccccaaacccaacaccatgaggctgagaggctttatttggctttatttagtaaaatgttaaaataaataaatacaaattgatcagctgctctgtatccccccccaccccctcaaaacaaaaaccaaacaaacaaaaacaaaaactttgaagcacaaaactccaaatacaagtctaccaagactgaaatcacaaagggcatggacaagagacagggttggggtctggctggctcttctctgctaggagctggctgacctctggcctgcccgtcccatcccgcctgactgcagctcaccctgggctgaggacccacggacaccggagagaggtgagggtccaaaggctgctggggaaggggtaggggggtggggtcctcagggaggaagggccttgtgggagggggcgccaagtggaactggagagccctgcttccgtttagaggaggtatttttcagagtccctaccccggctttctggagggcagccccagcttcctgcccctcactttagcaaggggccagaagactgcccagggctgcccactcctgtcttggagaggagctgactcagaggacagtctaagtcagggtgaggatgggagtcctgcttcctgccaggggtgcccggcagagggacaggggcgaggttcacacagagcaaagttgcctccactcaacagaagccacgggatctggagaacccaggccctggaaaatgcacctgggccaccatccatctcattaccctaagagccttttgcccctgggtaaaaagtctcctaaattcagccctttagataaataagaaggaccacgccctataagagaatgaagagaggaaaccactgaagagtgtgtgtgagctgggaggtgacagcccaagggaggctctgatggccccaagagagaagtatcagaggtggctggagaggcagccgtgcatgcggagacggaagcgtgctgcagacacggtcaccctcacggaaacagctgtgtgtaaccacctccatgcacgctgcctgttgggcctgagccaagcagcagcagggacagagaggcaggtgttgcagggaaaccaggcacacgatggtgccagctggaggctgccagggcggccccaccagggactgcccctaactgcctccctatgtcaggtacaaccagcaggcttaccccaaagggcctgataaggaaggaagaaatcaaaaccccagaggagctcagcacaggtgagacaagacccagcaggctccatgaaagaaaaaggacccacaggcagcaagaatgcagaggtggagatgacagcaacatggcctcactgttaccaggatgcagcgcctggacaggagctggcaggggactcccagtcatcactgccaccagggcgcagcgcctgatcaggagctggcaggggactcccagtcagggcccagtgggcagccgctccagctctctgaagtgactrcaaagccagctggtctcaaaagtggctgtcagagcagctaaattctgggccgtggggaaagagcagcggagggaaggaggaggaagcaagtggaggtggctggggtggggcagtgtcacgagcgtatgtctcaggtggtcacaggccccccccccctccccgcccaggtctgaggggacagtgaaggacagggagattgggtgccaggggcctcttctttacagtaaagcagtgttttggaatttgagtgcagaatgtaggtttgggggctgggttgcatctcgtactccatactagctgactcccaaaacagctcacatctgaatgtcaggaagaatccacagcccagctgcaggcgaggtcagaatgtacccgacactgctgagggcggcaggcaaagccctggtcaattcctagccccgtcctccgacccaagactcctaaggcagctcctctctgagcaaaggcctctagtgatgatggtttcccaacttctttcaggaaaaggtaagttagaggtgttgtgtggcaacccccagatgggcccagacaagttgaggggaagagctctagacagggcagacagcctgctgctggtctctgatcctctgccaacgattcctccaactagtccaggcatctccaaggctccctgactagacacagcaccttggtttctgaatgagaaaagggaactctttccccctcagccaatcaagcagccagggcctaactctgaggcctgttcagcctaacttaattccttcttctgaggcccctgggaagatgaaaggcgatggctgatagagatgagacacattttactctaagaagtgtctcttctctgttgcatttgctttcagatctgtctttgtctctctgggcctaattgggtgggagagaagctgataggatcgtttctacctctcctagactctggccattcccagggcctggagtgggcttgggggagatgctccagcagggccagggtacagagcctccaccgccctcccatcggccaggggcacgcaaggggcaaaggtctccagcgagagcacaaatctgacacaatttacttctgacaaggcaagatgagagaatggtctgagtctttcacaaccctggttttctcaaggagaggccacaaccggccaagccgaggcaagcgcagcaattctagcccagggtcacccaggaggcttgtgggtgggtggagtggagtaaatttctggtgcctggagccaacaggcagagaaaggagtgggagcttcagacctctccccaaaggcaagacagagcgaaggccacgctggggctctgtctcagagacgtaccctcaaaacatgtcactcctcctctgttctaagcaccaagggctgatgcagccgtactcccgcaccctcctgtcacggccagggtgcgtgcgcaccacagagctccgctggccagttccctcggaggtgtcccccaggcactcataatgctggtggctgaaagaccaaaagcagcaccaaaggaagggatcttatttaggcaccagccttttgctctagcagaatctgagaagaccacgggtagggccctgataccatccacgcttccatttgggcttcacaacaggagacaagatccctgcaccaagaagagagcacggtcttttctgaggagagagaagggtggggagctccgcctctgtccttcaaggagactggcccaccagtctagagacacacacacggcaaaatgtcatcgtgatcagcagggtctgtgctaaaaaattataactacacggcattttctccagttctgacacctttttaatagaaatcactgtttttaggaaacaaatagcacttttgtaatttttttttacaatgtttcttaccttgatcttaatttaagtaacactaggaagacctcaatatcttttattttcctttttaatttaaaaaaaagttttttttccccagatacaaagatttttgcccttgcataaaaaaacagtgcccgaacgatgacacaaggactcacaaagactcacgggacctcactgacactatgattcctactctaccatgcaaggtcttggctacccttaattggactgtcagcctgaaaaacagcttttctattccttattttagtttttgttaccaagaaagtaaaatgaacagtaaaataaaactttccttaaagaaaaaaagaacaaaaacaaaaattaaagaaagagaaaagaaacgtctccattcaattcacacacacctgggtcgcgtgctgcttcactcaagatcttctcttcttataaatatagaaaagggatggagcttgttttcaagtaaaatcactgatccacctttttttccttcctggacacacacatccttcttccctgccttgggcaagggccagtggcccgggctctgcttgttcttggagaggagacagcgggataaccacggagatgcgcgactcaccaagcagggaaggaaggagactgggcaggcttcaggagtggtggggttaccgcgcagggagcagagtgcaggggagaagaacctactggctgttcttggtgtcagtctccccttgcacgaggcccccgccagaggtgattaaatactgcttatttgatacactgtcccaccccctgctccctccagccactccccttccctcttctgggcactggggttggtgaaatctcaattcctttttttggttttatagtagcgaaagtttagaaacaggaaagcccacacactctttggacttgtcttctctacctaaacaaacggctcggcaagtaaggatctgaaacctgctctcctccctccgcccgtccctgctccccacccaagaaaacagaaacaaacccatcgtggctgtggaggctgctgcaggcacacactggtgtataatagagagagtaaatatattatttcacttggcatggtgctggcaaagaacctccagctggcactatttcatgtaacatggtccaatctttgcatgtacacacagaataagaaggatcaattggcaaactctggtgccacctggcacaagcatcttctctctctctggaaccaaagaaccaaaagaattctgcactttccagaaatccggctttgcttttctagagtcttcagtgttctgttctccttgccgccgggatcccgtggcttctcctagaggggctctgttatttagtctcttccccctggttacagttygctgtgcagctctgggaggagggggaagggsycggcgtggaggtggcggcattggcagggggggtgcagtccgggccattggagatggcccccacagtggcctcagagtctacaggtttggagaggtcgatgccgtggatgaggcgaatcagctgttttaccttctccagggagctgtgcatctccttctgccgggccaggatggtgttcttcatttccatgcatttctgcagcaaatgacaagggcagtggcactgagccgcctggtttctaacaggcctggcagcccctaagagcagagcgccttctctctgcccagggagaagaagctctgctggctgctgtgcagcccctgggccttgctgtgttcctcagtggagtgggcggctaccacctaaggaacagggcgggtggagtgggtaggctggggggtcccaggtcccagaggcaacagagggagaaagagcatgcgggcaccaacacacaggagtactaacgcttaaaaacaaaccggcagagccgccatcagacttccaaacaaaggttgtttaaaaaaaaaaaaaaagttcccacagctgtcctgcagcctgtttaggcaggttttgatatgcttctgtcatgctaactggggagccttcaggactggactgagctctccagggtggaaaacacacagtgctatctggattccatctgagggcagcaggaagtgagacgacaggccagcagcatttaggaggatcgaagccccaaggacaaaggcctgcagccagtacaccttctgctcagccggggacttagagtcttttgcccttttgccctcagcttcccacacctgctggcttctattttaggcagggaaagagaggaaagaggtgttaaatctgcatgccatgggtaggtatggtgaggaggagaaagcaggtaagcaggacagttcaactgccaccaagtacaaggcaccacctggtatccatgagggctgaggtcacttcactccaacaagggtgacctactcaatggaaaagaagactggctccttgcctgggagaagcctctgtccccctgctgcaaatacaaccctctttcccacttggaca

SEQ ID NO: 95288 - DNA, 19592 bp, Homo sapiens
ttcgccacgttgcccaggctggtctcaaactcctgggctcaactgatccccttgccagggcttctcaaagtgctgggatcataggcatgagccgccatgcctaacccttatctgagtttttgtaacagtttgaccaacaagcttgttgttggaaagctgtaagagtcctggaaatttccctggggcctgaggaatcaaacactgctctacaaggggaggctttctgtcctgagagttcaggctttaggggctggctggaggcctcaggcagagatgaaggcccagttatgatttccttcactggagtccatcattaatgagcgccttggctggggggatgcctgctaagagggcatggagtacagatcctccactgacacccccacactcctagcagcaagcaggacttagtggccccacttactccctacagggtaggaaaagacggcagtgccctggtgaggagctgtatagggggtccttcaggatgcttgctgggaggggtggggagggcacaggacgtgctgggaccccactgggatctaagcccctcccagctgatttattcttaggatctgtaatgctcgcctgcatgtgccccgaacttcagaaggcccaagaatcaaccctgacaaatgtctttttgtcctgtattcagtagagataagattaaaaaaaaaaattagtagagggcaaaaaacagtggtttactctctttactggcattcaagaaacttcttcggtttgataggctttaagcttcttcccagattcaaaatgctgtgattggcactaaatggatccctatctctgcccaggaattccggcttctggctgcaaagcctttggggtccttgcaatggggcaggtataacttcccatattctcttcctcaatcttcctttcctgcccctccctctctatttttttttttttttttttttttttgagacaaggtctcacaccgtaacccaggctgaagagcagtggtgcaatcatggctcactgcagactcaacctcctaggctcaagcaatcctcccacctcagcctcccgagtagctgggaccacaggcacatgccactacgtccagctcatttttgtatttgttgcagtgatggggatttgccatgttgcccaggctggccttgaacttctgggctcaagccatcctctcacttcagcctctcaaagtgctgggattgtaggcttgagccactgtgccctgcctgcctttctgttctgatgcaggaagccctgactttggagtccttccctgtggatcacctctgataaatctagtctcttgttcatctgctcttttatttattaaaaaaactttttaaaaagactagtaaagtgcagtagtgagaaggtgggaaagggtagaacaaggagctcgatctgtaactgactgtgaacaatcagttgagataactcactacctttggaccagcctcatctgcccttttgaatggttcctctcagttttttcatctgtaaaatgtgaatcgtgcgtggcaggaggtgagtggggatttgtagtggagaattctcaaggtctctcccagctctgacacttggggactcagggagtctaccaagggcaaaggcatcatcctaagtgcaggttcgtgtgtgggggtgtatgaaacagttaagatgaagtgcccatcctcaaggagtttgcagttgagtagctcagtggcatgcataataaatctcaggtaggcccggtgtggtggctcatgcctgaaatcccagcactttgggaggccgaggtgggtggatcacgaggtcaggagtttgagaccggcctgaccaacatggtgaaaccctgttgctactaaaaatacagaaattagctgggcgtggtgtgggcgcctgtaatcccagctacttgggaggcagaggcagaatggtttgaacccaggaggcagaggttgcagtgagccgagatcacgccactgcactccagcctgggtgacagggcgagactccatctcaaaataaataaataaataaataaataaataaataaataaataaataaatctcaggtagatattcaggaagtgaggcatttcagagttcatcagaattccaaggaggtataagattccttctggaggcagaggggtttggtgaagggaataaagtagggttcccaagttcctttccaaggccagtggtgcagatgcttttggcttcccaaccaaagaatcccagttattgcccaactctgaccccggcaggcaagtcttcccctaccaggcaaccacactcacactttctgaattggtgcctcattaattctttttttgccttcttaatcacactgctaataatacttatttttatttttatttttattttgagactgagtctcactgttgtcggccccggctggagggcaatggcgcaatcttggctcactgcaacctctgcctcccaggttccagcgattctcctgcctcagcctcgcaagtagctgggattacaggcgcctgccaccacgcctggctaatttttgtatttttagtagagacggagtttcaccatgttggccagactggtctcgaaatcctgacctcaggtgatccactcaccttggcctccaaaagtgctgggattacaggcatgagccaccatgcccggacaataatatttattaatataatatcactagctgataataccactggccaggcgtagtggctcacgcctgtaatccctgtactttggaaggccgaggcgggaggatcacctgagctcaggagttcgagaccagcctggccaacatggtgaaaccctgtctctaccaaaaatagaaagattagccaggcgtggtgacaggcacctataatcccagctcctcaggaggctgtggcaggagaatcgcttgaacccaggaggtggaggtttcagtgagctgagatcatgccattgccttccagcctgggtgacagaacaagactccatctcaaaaaaaaaaatatatatatatatatatattattattaataatatatttaaaattcatgactagttgtttccattcatcatctcatctatttctcatctaaaggctttgcttaggtgggtatgaatatgattacagacaggaaaacaggatgagaagttgagtgactcatggcaggccccagagctaaccagaaacaggaatatttgaacttgagtttccgagagcatcttcttcctactcacatttcttactcattgcagaaatgagagaacccagtgaggagacgaggtgacaagggcacagaatcttgaatgtcttgagagcaggaggaggagaagaaaacacggtaggagtcaggctaggagtgtggatttgggccaaggcaggacaaaaagccaaggttaaggctgaaaaagctctccctgggagtgcctgaacaacagattaggatgactggacagcaggaaagatcagagggagaaccacctatgagacaggctcctcagcgaaactcccatggggtgacgcctctggggcttgaaccacgagccctttgagggcattctagcttggcagctctggggtcctgtgagttctggtgcagcttctagagctgcacctcatcccagtcacctctccagttactaaattccatcttctcccagctacaaaggagggaagcagtggagtgctgtggtgacagtgcagactaggccactgggtggcctgggtttgagtcccggtttctcctccacttcctagccgtgactttgcacaacaattcctctggtccctggtttcctcacctgtggaacggagctataatagttcttacataaggatgggcatggtggctcacgcctataatcccagcactttgggaggctgaggcgggcagatcacctaaggtccggagtttgagaccagcctgaccaacatggagaaaccccgtgtctactaaaaatacaaaattagccaggcgtggtggcacatgcttgtaatcccagctcctcgggaggctggggcagaagaattgcttgaacccaggaggcggaggttgtggtgagccaagattgcgccattgctctccagcctgggcaaccagagcgaaactccatctcaaaaaaaaaaaaaaattcttacataatatgaattgctggggttgaaattatacattaaaaggctagttgcactaaaccctcacaaataggagctattatgattatgcagctgcaaacctctcgtgttttggttcacgttgttcccaaagtgccttttctctgcctctcaaatccttcccacacttcaaagtcaacaaatgccaaaaatacaacaaaaatgtggaggccatagacaatagtggagaaagagtatggtcttgggagccagcagcctgggcttgaatcctgatttctgtcaccttgggcaaatttcctcatctgcaagtgggaaaagatagaacctgcctcagagggtcattgtggagatacgaggattgagtgagttaatatttgcaaagcactcagaacactaactggcatgcagtaggtgctttactggtacatgatcgccgctcactgcaacctctgcctctcaggtttaagtgattctcctgcctcagcctcctgattacaggcacactccaccatgcccggctaatttttttgtacttttagtagagtggaggtttcaccatgttggtcaggctggtctcgaactcctgacctcaaatgatccgccagtcttggcctcccaaagtgctgggattacaggcgtgagccacccaatgttattgttggctactaatacatgggtcttatttgccctctgcttgcttgaaggacaggaaacacattcaacccatccttgagtctagtccactgcctggctcatgtttggtgctcattaaagtgtctagattgaaatcaaccaggagattggcctgccacagtggctcacacctgtcattccagtgttgctgtgaagttgctgcaggaggactgcttgaggccaggagtttgagaccagcccggtcaacatagtgagatctgtctctacagaaaaaaaaaaaaaaaaaaaaaaaattagccaggcctggtggcatgcctgtagtcccagctattcaagaggctgaagcaggaggatcacttgagtctaggatttcaaggctgctgcagtgagctatgatcatgctactgcactctgctttgggaacagggggaaactctgtttaaaaaagaaaaagaaggccgggcactgtggctcacgctggtaatcccagcactttgggaggccgaggccggtgtatcacttgtggtcaggagttcgataccagcctggacaacatggtgaaaccccgtctctactaaaagtacaaaaatcagccgggcgtggtggcggctgcctgtaatcccagctactcgggaggctgaggcagcagaattgcttaaacccgggaggcggaggttgcggtgagccgagatcgcaccactgcactccagtctgggagatagctccgtctcaaaaaaaaaaaaaaaattgtaataataaattgctgattggggctcggagaagaacaggcagtgactagaactcgccccttcctgaaatatttgaagggtcctagcgtttgctttcttgttggaggcccagaaagcactgacttaacgtgtgtgaaagattgtagacagagacgggataaagagccccgcgctggaaaaagagcaggctttggaaccagcagggtcacgggcagtttccttacgtgtaaactaggagtaaaaagatcagtgtcctgctgaaatgagagagtaatagtaaaaactactatttaccgagcacttccaggtacccggtatttatgatcacattttacagatgaggctgagaggtttcccgacctgcccaaagacacaaagcaagtagaatgtacgagtgaagactcgaacacaggtccgtgaatcaatctctgcgtggggatgggagcggttccagtgataagggccacttaatctggccgagctgctccggagcagcgcggcagccagcgaattggggccgcccccacaacccgccgccckccgccygccgccctccgccckccgccckccgccctccgccctccgccctccgccctccgccctccgccctccgccctccgccctccgccctccgcgtgcttacgtgcgctccgtgactgcggcgaccgacgcgggactggagagggaggacgcatgcgctctgccgtgccgaagcgcgccccctcctgtcgggggccgcagcgccaggatgcagcgcatgcgcacacctggagggcggagagcggtccagagcgagtggaaagatttgggcgagaacttgcgcgggagccggactgagcggtgcgagcgcgcaggcgcggccgacggggcgggctgctactccggaatctgctaatcccagtcggtgccgcatccccagcccgccgccatggccgcctacaaactggtgctgatccggcacggcgagagcgcatggaacctggagaaccgcttcagcggctggtacgacgccgacctgagcccggcgggccacgaggaggcgaagcgcggcgggcaggcgctacgaggtgcggaggggccgggtgtgggctgcgaagggccgggtgtccggcctcggaggccgcctggctggcgtctgcgccctctcggagagggccggcaccttgggcagcatctctcttaacagtttagtgtgtagttgagaagatgagtgcagagggtagagtctacttgttcaaggtcacgccgtggagcatgaggggctgtgccagggggaggacccagggcggtcgccccgcaaccctttgcgctccccacgacaccacttcgcagttttccctttctagtctgaacatttaatatgtcggggacaggccgggcgtggtggctcacgcctgtaatcccagcatgtggggaggccgaggcgggtggatcacttgcggtcaggatgttcgagaccagccttatcaacgtggtgaaaccccgtctctattgaaaatacaaaattagccggccgtggtggcgcacgcctgtaatcccagctactcgggaggctgaagcaggagaatcgcttgaacccgggaggcggaggttgcaatgagccgagatcgcgccattgcactccagcctgggcaacaagagcgaaactctgtccagaaaaaaaaaataataataataagtcgtggacagtttgccctaatggaaccatctatggcggccaggtctttttcaggttcccttagcgccagaagcggttggtacagtctggtgctcctggaggacgccctgtgccttaaagcagctgtaaccaaggcctctcaagaggcggctacggatcctagcggatcgacacgccacacagcctcgtccccagcagtaggtggaggccctgggggtgcctaacaagcctcagaacaccaagaaatccgcgtggttgtgcaggtctttgctgttcagtagcattccacaaatagtgtgtccaaaacgcatctgtagatgtaacttgagtgaatgaatgaatgattcgagttgctccttctacccaataaagtagataagattttatctttctcatctttccaaggcccctttatagttgggaaaagtgagtatttggaaagatgacttgtccaaggtcatatctgattcctagtccagtgtcctcgccctagtcctgggtgaagtaacaggtaggtgtgaggaactggtaggcttttggctaaggacgctgggcaaaggtggaagtggctgtgagataatgcttgcctatccaggcttgctcccgccccagtctgctctttgtggtgttggaatgctaataaggaagcattccctgctgccggcacggccaagaatccctggactgaagaggtgcttccgctgatgataggggcagatcctcctttgctcccttctaacctctggacaaagaagcagccattcacaagggtcattgatgaggcacaggtatttggcctcagattgctctcctagcttcttgccttcactgtaccatccttctcaaatgaagcaaaacgcaggacagtctggtaaatgtaaacctctgcggggtggggtgggcaggggagtgattgtttgagatggcctggtgtgacctcatcttttaggagaggctgggaaatggaaagtgctggtaaaggaggccattttctttagctctgtggcaggaagaactgtatcagtccgtggtagtttcccaatgactagtccacgttaaaccatgttgtctctgtttgagactaatcaaatagttaaacttgtaatctctgtaaaataacagatcctatttcagttttaaaataaatgttagcattaaattaaaaatttaacagtatagaaaattaaaagatttaacggtttaaaaggtcgaatacatatatataaataattcctcagtgctttaagtgatagggtttgtacagccttgaatctgatttctggagaaagctagtgagaactgagtttccccatgcatccttactgctaagagagggatggcctgggggaggatggagtccacaccacactgtccactcctacccctgtgagtgcccctggctatgttttagtttgatgggcaagttaaaggaagaggctttattctctgattcttcaggttctctgttaagaatcctaagcggaacttcttttctccttgaggacctatttatgtgtccaaagtgagccgcctcattgcaagtggaaataattgcagtgaaacagcctgaagctccccagctgaggcttgcactgtgggtattcacttccgggtgtctcagccttttgttggggagccattcctttccttacagttaggaaggcgacagtgagtgagtctactaggacttgtctggcggctcagtgatgagacctgttttttctcttgtgggtggtgtgagttttcctggtgattagttctccccagccctcactcagtaagaatgagttcttcttggcctcattctcatttgaatgactggcagaaaaattcacttcatgttttattaattactgttgctaaccccaatatgaagcaatatccaggcaagtttgtgctgaatttctaagagggccttctagcctaatggagaaaaacaggaatgttttcttggtcatcaaggaaagggctatctccccattatggtgggagggtgaataatctttaatgaaacaaaatcaataagactgattcctttttttttttttttttttttttttgcgtgcgacagagtctcgctctatcgcccagactggagtgcagtggcgcgatctcagctcactgcaagctccgcctcccggattcaygccattctcctgcctcagcctcctgagtagctgggactacaggcgcccaccaccatgcccggctaatttttttgtatttttagtagagacggggtttcaccatgttagccacgatggtctcaatctcctgaccttgtgatctgcccacctcggcctcccaaagtgctgggattacagacgtgagccaccgtgccgggccaagactgatttcttggaacctattcattgggccaacataactcttgccacaataactactgtgtatggaagacagattcattgatgaatcagatagtgcacagcactgggtctttctttagtgagtggcttctcctaaacttggtttaacatttaagtaggtatactctgagggtacttggtattaggctggaactttgtgactacagtagagagaaaccatggattagagtttgtgatgtgatttccatactccacagtgaatacaatttcatacaatggacaaatacaattgcaaacaaatacaaaaacaaaataaaatttcatacaacaaactgaagttttatcagtacaggaagagctcttcctgtgtcctgattgggatttaaatcctaattttcttacttcagagttctagtaaaatatcttttataagtgacaattcccagtctgggcaacatggtgaaaccttgtctctactaaaaatacaaaaattagctggatatggtggcgtgcgcctgtatcctcagcttacttgggaggctgaggagaagaattgcttgaacccgggaggcggaggttgcagtgagccgagaccacgccactgcactccagcctgggtgacagtgagactccgtctcaaaaaaaaaaaaaaaaaaagaaaagaaaaagtgacagttctaactgaaatgcaaacatcaggatccttgggaattaggaaaatggggatagctagagatggtggtgaaaagttggattctggagtcccacagcatgggttttaatctaggttttaacccacataatagctgtgaccttggatagagtgcaaggataaacaaaacagttggccaaatattttcttttttggccaaatattgtcatttggactacttgtacaggagattgatactgaagaacattttggctcagagtagacctggttagcttatcactttgaacttctgatttccagatgctggctatgagtttgacatctgcytcacctcagtgcagaagagagcgatccggaccctctggacagtgctagatgccattgatcagatgtggctgccagtggtgaggacttggcgcctcaatgagcggcactatgggggtctaaccggtctcaataaagcagaaactgctgcaaagcatggtgaggcccaggtgaagatctggaggcgctcctatgatgtcccaccacctccgatggagcccgaccatcctttctacagcaacatcagtaaggtatggacaaacagaggtttggtcactccgcccaggatcaggggcttttagtagtgtctgcctaatctcactgaacttacaattcatgataaaatagttaattgtaatccttccttctccagtgaatgaccttcacttactagaagatatggttgatagtttactatctccttttttgtgtttccatagtcagattttataaaaccctgtgaatgtgaatgggccaaaatcgatacatcatgaagtcttttaacagatgtaactcttaataagtggtgaacttggattctttattgcttaggatcgcaggtatgcagacctcacagaagatcagctaccctcctgtgagagtctgaaggatactattgccagagctctgcccttctggaatgaagaaatagttccccagatcaaggaggggaaacgtgtactgattgcagcccatggcaacagcctccggggcattgtcaagcatctggagggtatgtatgttttttcagaggcgccctcaaggaaggataaagcagaactgccacaaatcagggacttggtaaaaaggagtctagggaagggctggacatgttaacagctttagagatggtctagattgacttctagtgaaaaaacaccctcaacccttgtttctcaaaatgtgatctgcagaatagtgacagctggaccccctgggagcttgttatacatgcagaacctcaggtctcactccagacctgtttcagaatcggcatctattccccaggtgatttggatacacattaaagattgagaagctcacctctagattggtattgtcaaatgaaactgctagtgaaaatcctccttagcttgccaagcacagtggctcatgcctgtaattgcaacattttgggaggccaaggcaggaggaccacttgaggccaggagtttgagacagcctgggcaacatagtaagactgcatctctacaaaattttaaaaggccaagcacagtggttcatgcctgtactatcagcaccttgggaggccaggagttcaaaaccagcctgagcaacaaagcaagaccttgtctgtacaaaagaaaaatgaaaaattagcttgatgtggtgatgctcatctgtagtcccagctactcaggaggctgaggcgggagatcgcttgagcccagcagtttgaggttatagtgaggtatgattgtgccactacattctagcctgggtgagagagtaagaccttgtctcttaaaaaaaaaaaaaaggaaaacaaatatatataaaagaaaaaattctccttagtcacaaccaggcacaactttacacatgaatctcaatttgcatcttcatccccgagggcctagaggcccacgtgtgctgatttttggttggatgggctgtacagggtatttgagatgtgtagtcttgcttcactgtgggcttctagatcccactttggtagagatatctggccatataccttgctgtagtttgttggtggtctatcttgtataccttttcttgcttttcagtttaatrgctgagaaataagtatggtgggggccattccctgggttcagaactactataaagatcagaaagggtgtcttattttaatttctgtcaaagtcctttatcacctggaggacaaagtaaacctggaggggtgatgtggatttatgtcttgtgtggctgatgatggtggatgttttcaggtctctctgaagaggctatcatggagctgaacctgccgactggtattcccattgtctatgaattggacaagaacttgaagcctatcaagcccatgcagtttctgggggatgaagagacggtgcgcaaagccatggaagctgtggctgcccagggcaaggccaagaagtgaaggccggcggggaggatactgtccccaggagcaccctccctgcccgtcttgtccctctgcccctcccacctgcacatgtcacactgaccacatctgtagacatcttgagttgtagctgcagatggggaccagtggctcccattttcattttagccattttgtcgcctgcacccactcccttcatacaatctagtcagaatagcagttctagagcacaggttctcagtctaagctatggaaaagctccccttatccaacagagtttaaaagtagtgacttgggtttttgcgagtgctttgtttactaaggactttggggaggaaccatgctaagccatgaccagtgaggagaagcaacagagcctgtctgtccccatgagcggagtctgtcctctgctcttctgcagtcaggtcactgcctactgcctgggggctctagtcattccagtggaagacgaatgtaacctgcgtggtgatgtgacaactgtttcctccctgaccccagaggatctggctctaggttgggatcaatcctgaatttcgttatgtgttaatttacttttattaaaaaagtatagtatatataaataatacaaaacaataacccttctggggtttcttgtggcggttgaaatagtcccacatgtggtcatcagaaaataagccattcctcataccaatataggatcagctccttgacctctgaggggcaggagtgcttcctggtgtgtgtattagaatcccttcctgccttgtttcatggcagtgaaatgcctcttggtcctgtccaagtgtatctttcactgatttctgaatcatgttctagttgcttgaccctgccacatgggyccagtgttcatctgagcataactgtactaaatccttttwccatatcagtataataaaggagtgatgtgcaatagcttcttgtgtgatgtggaagaccttatctgaggaaactttagcatttaacttgaaatgtctctcactgccctagtccttgtgtggcagtttgttttaggacatccagtcacaactttacacggttggtcaaaaaatgacgcatctccttggggttttcacgtcagcctggtgagctgaggtggtggtgggaggccctcctggccaagccctccattcacgttgccccctgcagctcttgcttggtgctcccctgattggaaagtcacattctgaactccattatatcctctttagagtaagtaaagtctgctttttgttttttctttttgagacagcctcgctccgtcgcccatgcttgagtgcagtggcatgatctcagctcactgcagcctccccctcctgtgttcaagcaagcctcccacctcagcctcctgagtagctgggaccacaggcatgtgccaccatgcttgcttaatttctgtatttttagtagagacggggttttgccaagttgcccaggctggtctcgagccagttttggcctcccaaagtgctgggattacaggtgtgagccaccgtgcaggcctcagaatttttttttttaactgtttattgttaccaacttgtaagatgatctcaaaaagtgacttagtgcagtggaaaggagtataattacattataaacacaattgccttctcctttgaaaagttcactggactacaagaaatcccataaagctggagaaagaacattccctttcccttctggtaggaacaagtaacaccctccatctgttgagctcctaatgaagctcctctgtgccacccactggatgagggatattacatatgttagctctcatcttaacccatgaaagggctggtaactcctgtttacagaagaggaaacagtcccaaagaaacatgtaaaaagcaccaaatatcacaccacttggtactggggctgggatggatattgctagtgcaaacaaatgaaggttcttacccaaagatttaaatactttcaagcatcttgcttttcaagtttagattttcatttgacctacacaataactttgagtaatttcagtctccaagagcctggtgggatgttattttcctaacctgtgcagaattctagatcagaagttggtaattttggccagcacagtggtacacacctgtaatcccagcactttgggaagctgaggaaggaggatcacttgaggccaggaattcgagactggcctaggcaacatagcaagacctggtctctacaagaaaaattagccaggcatggtggtacatgcctgtagtcccagctactcaggggattgatggggaatcacctgagcccaggagtttgaggctacagtgagctatgactgcaccactgcactccatcctgggtgacattttgaggccctgtctcttcaaaaattgcatgtacaaaacaaaaaacccaaggccaggcatggtggctgatgcctataagcccagcactttgggaggccagcactttgggaggccaaggcaagtggatcacctgaggtcaggagttcaagaccagcctggccgacatggtgaaacctcatctctaccaaaggttagctgggcgtggtggcgcatgcctgtagtcccagctactgggaaggtgtggaggctgcagtgagttgagatcgcgccactgcactccagcctaggtgacagcgagactctgtctcaaaaaaaaacaagaataaaaacaaaaacctggatgtggatctacaatgatctcaatctctaaaattttcaactatagaaaccctaatattcaaggttaggaagtagaggatagaaactaaggtgggctgattctaaagctcacattacgcacggtcactaaatactgaagacacaggcttcctgaataacatctcaagaagtgacatctcagactcatatttcgtcggcaacctctccatgcttaactctcatcccttcctcatccccaaacttacgccttcatttctgcttctgcatttagcctgggcttgtctctctgccttgaatatcttcacttacttttatgttctttaatttattttgatctcacgtcactaatcctttcctggccacctcatatgacagtactctgtcccacttttcaattcagatttaacatttcctggagtacccactatatcagtgatgtgtatcaaatacttttagacatgttatttatttatttattttgagacagagtctcgctctgttgtccaggctggagtgcagtggtgcaatctcggttcactacaacctctgcctccagggttcaagcgatcttcctgcctcagcttcctgagtagttgggattacaggcatgtgccaccacgcccggctaatttttgtatttttagtagagatggggtttcaccatgttggccaggctggtctcaaactcctgacttcaacccaactcggcctcccaaagtgctgggatttacaaacatgagccaccatgcctgcctcacatgctactcaataagcagaagtactgaaatgtcctgacaccatttagatgtctttctctgcttaagacaacagactctataacatccttttagtaaaaaagttttatcatagcaaaaaatatgtatttataaggactgtcaggagggataggctatttccaatatcacagttttgtttgttggtgccttgaaaagataagatttattactcaagagaatgaaatccactgataggttcacagaaacatgttccatctacagcgtaaactggaagatttttctggaagtggctgttggccgacgccaggtgtttgaataaagacagcagcatcttggtgttatactcaggaacagcttacccccttccatagggtaaaaagtggcttcttaggtctgcaagaattcgggttgtactcgggctactttccggaattctttagtgtgggtcttagggcactgcatctcacaccagctgatgggaaccatctggatacctggaagggaaaagctggtggtggagcccagaccccaaagatttgcctgcgactcctcttttatgctgggtatgaagctgaagtgccaccaagcttcctactgaacctcaactcataaagaaaaaactttgttcattctactgacttatgaagtgagtcccgtttccttggatttatataaggagaatcaggctgggcgtggtggctcacacctgtaatcccagcactttgggaggccaaggcgggcagatcatttgaggccaggagtttgagaccagcctggccaacatggcgaaaccctgtctctactaaaaatacaaaaattagctaggtgtggtggcgtgtgtctgtaatcccagctacttgggtgacaagaattgcttgaaccaaggaggtggaggctgtggtgagtggagatggcaccactgcactccagcctcctcgacaaagtgagaccctgtctcaaacaaccaccaccaccagcaccaagcaaaaaagaaaaaaataatcattctaatctcagagggaaatatctatagccatactgcttcccagataagggaaaccaggaaaaacaatggatttatcccaaaccatagatccagggaaagtaaggatgtggaaacaaggccatctcacctgactcactgtgggctaccaccactcccagctcgttcwcggcggtggttagcaggtagttggactgtgcatcacctaaggagatctagtcacataacaccggtgaaggaaaatgaggagttagaagtcttcccccaccttagccacctgagttgtttttctacctttttttttttctgagatggagtcttgctccgttaaccaggctggagtgcggtggcgtgatatcagttcacaacctctgcctcacaggttcaagcggttctcctgcctcagcttcccgaatagctgggattacaggcatgtgccaccacgcccagctaatttttgtatttttagtagagacagggtttcaccatgttgtccaggctggtctcgaactcctgacctcaggtgatccacccgccctggcctccgaaagtgctgggattacaggcatgagccaccacacccggcctccttctcttcttttgacaaaggaccagaagtctgctgggaataaaggataccactttggccaagacaatgtcacctgggcggaaactcttataaatttcaacctgtaaagaaagaacaggaatgttaagtgaaagctctagactgggtctatatgaaactgtgaacgcttctggtaaagccaatctactttctaatcctggagggtagaaatcatcattactcatgtcaagtcaagaacttttaattgcttctacagtattatcatacaaatgaaaattttttttttttgagatggagtctcgctctgtcgcccacactggagtgcagtggtgcgatctcggctcactgcaacctctgcctcccgggttcaagcgattctcctgcctcagcctcctgagtagctgggattataggtgcatggcacgacacaggctagtttttatatttttagtagagacggggtttcaccatgttggtcaggctggtcttgaactcctgaccttgtgatccgcccaccttggcctcccaaagagctgggattacaggtgtgatccactgcacccggcccttttttctttttttttaagaggtgggatcccactgtgtcacccaggctggagtgcagtgatgcaatggtagctcactgcagccttggactgctggaccaagggatcctcctgcctcagcctcccaagtagctaggactacaggtgcgtgccaccacttaacctcaaactcctgggctcaagcaatcctccagccacatcctctcaagcagctgggactacaggcatgagctaccatgcctggccaatttttgaatttttaaaatttttgtagagacagggtctcgctatgttgccagggctggtcttgaagtcctggactcaagtgatcctcccgcctcagcctcccaaagtactgggattacgggtgtgtgtgaccatgcctggcctgagataatacttttaagggattgagatacgtaaagccattaaaaaaaaagaaccaaccaacaaccttgtctttttcagttgctcggacatcttccttgctataaaaaaagaattaacagaaagattaattacctgtgagaaagaattttttttttttttttttttgagacagagtctccctctgtcacccaggctggagtacagtggcgcaattttgctcactgcaacctccgcctcctgggttcaagcaattctcgtgcctcagcctctcaagcagctggaattacaggcacgtccgccatgcccagctagttttttgtatttttagtagagatggggtttcaccatgttggccaggctggtcttgaactcctgacctcaggtgatccacccgcctcagcttcccaaagtgctgggattacaggcatgagtcaccttgcccagcctgtgagaaagaattattctgtagattcctagtaaataaagagctacaagaacagacagaacaagttgtaaatgggacacagctgctacccagaggagcagggtggagaagcatcctcagaccacatggagaggcagtatcaatacctctgattagataaaggcagatcggatttggcaagaaaggataaggaatttcgttgcctcagggcttgaacagaagcactatagcaagggcccccaacttctggtggcctgtgaggaaccgggctgcatagaaggaagtgagtggcaggcaagcttcatctgtatttacagctgcttcccaatcgcatacattactgcctgagctccgcctcctgtcagatcgaagtgggcattagattctcatagaagtatgaaccctattgtgaactgcacatatgagggagctaggctgcccactccttatgagaatctaatgcctgatgatctgtcactgtctcccatcacc

SEQ ID NO: 95289 - DNA, 96739 bp, Homo sapiens
gtgaaaccctgtctctaccaaaaatacaaaaattagctgggtgtggtggcatgtgcctgtaatcccaactacttgggaggctgaggcacgagaatcgcttgaacccagcaggcagaggttgcagtgagctgagatcgcaccactgcactccagcctggccacagagtgagactctgtctcaaaaaaaaaaaaaaaaaaaaaaaaaatatatatatatatatagtactgtttgtactgtttgttgtactatctagggtacatgtgaataaagctctgcctcagaacacacattggtgctatctctatgagaagcagctcggtcacaaaccaacccttggatttgtagcattgtttctaataccttctaaatggatagagggaaccagatgcttactgtaaatgtcagatgcttgaaaagtgaaaatatagtttgaaggaacccgtgctttccagaggatgaatactgattcctctttaacctggtacatcaaaatacattattgtagactctgaattttatatttagctccataaataatgatttcagtggagttcagtaattggtttctgaattggtaatatgattttaccattggatgagcataaatagataaaagccctggctcgtttttctttttcagggcttgtaaaatgtgacaaatgttagctgctgaaccaccattagatttcacagcataaaaccaaccacagcataattgtatagggctcatacttcaaatcactgctaattttctccacttaacatgtccaaatgcatatgacatactaaactatcaattaaatgtctcctacctgagctttggttttaattgtacctggaaaagaatgcctattgacaggcagtcccacttagtggtactctttcaactgctctgtaggttgactgactatcttttagagttcgccaatgttcttcttcatgatacagatttgtatcctggctaccacgtcttcttcattcaaattggacgatatatcagtcagcttaagctaagtcattctatggtaataaccctcaagtttaaatgacttaaaataaggcttatttctcttgatgttatttgtcagccaaagccattgtcagctttgttccataattctgggacccaggtaaagaagcatcccctcatggactggactagaaccaatgaactgtggtggggtgtggggggaaagaagcgtcccctctctgggacatgccattcttgtttaaaagggaaaagagagatgacagaaccaagtgagtttatgctcggcagtggcataccacttcctgtcacatatcattgaacaaatcaaggccaagactgccatccaaggtgaggaggtaaagtctgcccagtgggagggacaaaaatatttgggaatagtagtataatctaccacagaggttgttttcattctcaagcaggtatccttttgactgacttttggactatatacaaaatcagttttttttaggttttgctaatatacaagaaagactttcttaactctgggctggggtttagcctgatttatttttaatatgaatccacagaaaaataagcattaaaatcactttaaaaaattaatatttggaggccccataaatataatggtggtgtaaatataaacaatattaccttacaaactccactaattgaaatctttatcatattactctaagtggagaaaaataactgattcccacccaacccccactccggccatcaggaaactctcaaaaagaacttcatatagttagtattttaaggcagatcattcagatatgctgctcaaatttgatgaatatctcttgtcattttatatgatgtcacaatgaacagaggtatactttcatttacatagatggcaaatgatatatttttagatttaattgctatatgttaaggtatttgtatatgacatgtatattcaaggactgctttcttagcgattcttccttctctggaatttttttttttttttagctatttgtgaatagctgttactttgggcactgagcccagcttttcttaatctgactgtctttatctttttctattttaagatactttgaaaattattggtttattttctaaaaatgaagtaagtaaattatctctaggttccccttaaatggtattttattattagatggtttaaaacaattgtttggcttttcaacaataagtgtaaaaactgatcacattgcatgtcaaaatttattcacctatggtttgataataacagctataacacttacagagtgctactgtcattattctgggtgctttatatgtgttgtttatttattccacacaacaaccctataagtaccaatattatccgcccccctttgtttttttgagatggagtcttgctctctcatagcccaggctggagtgcaatggctagatctcggctcactgcaacctctgcctcccaggttcaagcaattctcctgcctcagcctcccgagtagctgggattacaggcatgcaccaccatgcctggctaattttttgaatttctagtagagatggggtttcaccatgttggccaggctggtcttgaactcctgacctcaggtgatccacctgcttcggcctcccaaagtgctgggattacaggcgtgagccaccttgcctggccatattatcccctttttatagatgagggatttaccatacttactttggtacacatctatattcagtattggaaaaataagccatgtttggcagggcttatcagtgaggctaggaatttggccagttaaagcaggaaaccaacagaagaaagggaagtagtagcagaagcttgtttagaggcttcctgaaccttactctattctccaaacagaagaatttcaaaaaaaggcttaggcaattcttttaagctgttagtcaaaggaaaattactttctttttagttctaggtcaacaaataatctactagtttttgtgaaggcgcaatctggaatttctatatatatatattattttatcttattttattttattttttgagatgtagtatcgctctgttgccaggctggagtgcagtggtgcgatcttggctcactgtaacctcggcctcccaggtttgagtgattctcctgcctcagcctcccaagtagctgggattacaggtgtgtgccaccacgcccagctaatcgttgtatttttagtagagatggggtttaaccgtgttagccaggatggtctcaatctcctgaccttgtgatctgctcgcctcagcctcccaaagtgctgggattacaggtgtgagtccaccgcgcccggcctatatatggattttattatgatcttgaaacattagccttttgtaatcttcgacagaacaaagaagctcaggaacatagaagcacaggaacctttcttcaagttagaacagacacaaagtgcacaaattccaattattccttttgatggctgattacctgatgatggctatgggacagcaactctttgtagtgtagctgcacttaggagcaaaaaggaagtcgaagagtagatctgacaacccaaccatagttaatgtggagagcatttttctatttgtagatattttggtggactacttattgtatgtatacaaatgtttttatactttttacatgatgattacatgagtttatgtaatgatataattcaatttaacataactgaaacttcaaagttgtgtaatggttacaaagttgtagataaaaatatctttaaagattaaaaaattatataagatgaagaaaagaatcaaatgaaagtattgagtcacatttttattctatttataatagtttctttgctgtctataaccttttcattagccttctcaaacaaggggttaaatttcagtggactcaattcttccaaattttgggagtaatatctatccattctcaccaaaagcagaaagtctggaaactaccagaaaataaaactctagaaactagaaactctagaaaataatctgttactaggttagctttcttatttgttaagtgaactataaagcctttaaacctttaaatatctaaaacaattttcataagaaactcagagaaattaagggagaaactgagaggaaaacagtaactggattgtcagttgctttgtgttgttgagaaaaaagaggcagttaaaattgataactaattgcagctaatatattggacaatattaaagtctgcaagtcattaacaagtcagggttaggcaggggtaatatttgttacctttcctctgaaacttgatgtctctattcctgaatatatcattactttgattcatcaacatttttggacaagtaacattagtaataaaagctatctaagtactttcccattgtcctgcttttttttttttaaataaaaaaggtgactatgttttacacatgatagttttttccatgttcttctggttaaagagcagatagaaaaaaaaaacttaaaacacggcaaggctgtaacatgccaaaggtcacataacctgtaggtacagccagatttcctaattattaatctattgaaatattttacagttcactagattactaaatccggttatcaattaatgatgcacctgacatacacccttctagtttcataaaaatcacctcattaggccgggcgtggtggctcacgcctgtaatcccagcaatttgggaggcccagggggtgcagatccctcgaaaccagcctgggcaacctggcgaaaccccgtctctaccaaaaatacaaaaaaaaaaaaaaaaaaaagcaggtgctggctgaggtgggaggatcaccggggcccctgagttcaaggctgcagtaagccgtgatcgcgccactgcacttcagcctgggcgacagagtgagaccctttctcaaaacgaacacacacaacaacacagtaacaacacaccaacccccaaaacatcttattaaactctgtggatctactccatttaaacctaattgtttcaggaaatagtctaaaaacatttttttgtcctggaatggaatgtgtatgtagcctcagggaataactcagtttatcaggttcttggctgtttttccacaggtccaaaaggataaatggataaagtgatgctgaaataacttagagaacccgtattccaacgcttctattttaaaacagtgaagcagtttttaaaatagaaaagtatctacagttttgctttcaagcaaatagcgttaacggaatcattgctattcaaaactatttttgaagtatcggtgtacatttaaaaaaaataatttttaaaaaagaaagctgtcgtattctggattccgcaacccccccaccccgcctcgccactcgtcgccctccctccacctccaccctcccatggcttaagtcgcatagctgaaaggattttgctcattttttccaaaacacttcacgtctgggtagtagccaatcatggaaagtttcaagcaaatgttacatttgggagagggatgaagcttgtccggggctgctctcggaggagtcgccagacgccctgacctgggggccagatgcgagctgggatcggctgagttccgacagctcggccagactcagccctgccaaacctgctgacctcactgccctcggctgcgggggatctcgcccatgagtctccccaacagctcgaattcccagagtggaggagcccactgcttcataaatgcgagaacccagagcccctagtacccaactaggctagcctcggagttggcacggcgtgcagaaagtggctactgagcagccgggcctggctcacccgcttcacacgtcagtttgactcctctccccgccccccaccaatcccycgccctactctccgcgcacccagagccgagagaaatttgactgccctaatcgccaatcaaaagagaggtcgaggatttgagccaatcgcagcgggcgaaaggggcgggccgtcggcgagcgctgaaggtctctagccctcccctgcgctttagcctcagtgcggagccttaggcggagcgaagagaaccggtcgcggcaatcctagcgcgcagcagcagcagcagcagcagcagcagcagcagcagcagcagcagcacccgcatccgctgcgggagtccgagccggaaccacacccaagtagctgccctttcctcttctgtcatctcaccgccccaccacagaccgcgttccccgaggaaaccggccgcccacgcccggagcatcctcccctgttgagcgggcgctgacggacccggcggcatgatgcggctgcgaggctcggggatgctgcgggacctgctcctgcggtcgcccgccggcgtgagcgcgactctgcggcgggcacagcccttggtcaccctgtgccggcgtccccgaggcgggggacggccggccgcgggcccggctgccgccgcgcgactccacccgtggtggggcgggggcggctggccggcggagcccctcgcgcggggcctgtccagctctccttcggagatcttgcaggagctgggcaaggggagcacgcatccgcagcccggggtgtcgccacccgctgccccggcggcgcccggccccaaggacggccccggggagacggacgcgtttggcaacagcgagggcaaagagctggtggcctcaggtgaaaagtgagtgtctccgcgaggcgcaggaggcctcgttcctttcggggcccgggctcaggctgtgtggggccctgcggtggggcgggataggagccgagggtctagaaaagagaaagaaagaggtgccgggcggcctgcgccgtctgcgccatgtgattaggcccggccccgcccgcgccttccccgcccgcaaccctccgccaggcacccacttcccttctccgcccccggcgggggtcgccctggtggggccgcggtggggcctgatgggctcgcctggcgtccccagcgccagagaggccgctcccctgcccgcgctgcgtgctcagctccctggcttgcggctgcagcgcctggccgcccgccccagccattcgtgggcgatgctgcacgaacatctccaccgagtgacatttaggagttgggcgttcagcagagcctttaccttcctgacttgtcgcttttcctggctcgtttccgctctgcctgccctcccttggtttctgccatcatccggttggaagccagatgtgacagagagctctttatatttcgggagtggctacctcaggcacgtgtagagccatctggggcaccggaaacaatgtttcagaagtgagattaggaggaatccggtcatgtggccgagaagatggggcacgcagtatagaccacctgtttgcataagggaccagctttggcttgtcaggtcttccgtgagatggggagatttttagaaataaaagttaaatagccaagatgaaatgtgacgtaatacactaactcagtgaaaaatctgagttgagtaggttttgtgacttcattgtgataggatgttgactcatcctgtatgtgtacggcacagtagtttagtcttaaagcaaaactggtttttcttaaacaatatgcaaagcagtctcctatatatttttgtcttgtgtaatacaaatggaccactttgttttcccaaaatgggtaaaaatttacggatctgctttcattataccttactctttttctggctttgtacgctgacactctaacctgttttgcttcccttttatttctgctgctatttccagctctagagttccttaagtcaaactgaaagtgagaacattgttataatttcaatctcacgcctgcttgatgttttcctgtaattgaagttgggaccttccagaaacttttctaaagttcttctcccagactgaaaaagattatttgaaaaaaatcacttgatgatgggcgaaatttgtggtattttgtgatgttggttttgtgccacaaaatagcgtcctgaccatggacaggttatttaatatcttgggttagatgacttaaatcctttcaagttctaaaaagctatacttctgttaaatttgtacttctctcatgttttagggactagaatgataatttaatctcatctgggactcacttttactttaacatcatccggtttaccaaggaagtaacgagtttacatgcaagtgcccaaggtacagaattgcaaaatgcagtcacaaccgtttaaaagttcatcttaaaggctacaagatgggaactgcattctagtaaaattatgtcttcaggtctgtgtctctgcagtggctctagtgcctctcttttttttcctcttttgtcaaacaggaaattgagcttcttctgtgattcacttgtccagaagtttctggtttcattgcctttttaataaaaaatcaccttttagcaagggcctcaaggttgtgaagaaagttttttaatttggttaaagtttctatttccttaatgatctggtttccaaatgtagctttccctctttggctcctttcattttgcctttatgtgacaaacatttctcttatcctgggaggtaagctcccagttgatcctgttatcctttctaatgcttagcctgcaaagcataggtcatccctcagtcagcagtccacctggtatgctagcactcactcaggactgtgccagattttatgtagtattattaaaagaaataaccatgagaaaattaaattaacattttgtaaaaggcttagaacaatatttggcgtgtgttaaatgacacataactatttattaaataaatgagaaaacattgcttcttcattattgtaaagcctgttaaagagattggccttggaatttcaggcttgcacatgaaggtttttaatttttttagtttccacaaaaatgtttatcttgagaaattgctatacatctgtcttatatgaaactatgtgagttgcactgtttaccttttgctctgctgataaataagttcagagtaaatttaatgcttaaccacaccaatttcatcagttcacatggctgggatatctgcgtttcctcctttccttggtcctgagtttatattttatttactttatattctggaaggaggcgtgatataagcaagttactttacctttttttcacaaactctttgaactaatgtcactttagactatgctgtttccatcacgcaactttagtgtggtttaggatacgaacgtcttaatatcacatagaaaaatttaatgatctttgctcagttttgtctttagtgatcttatttaattttgttatggttcattctgttatcttgaaaaccaactttgcttgcctctcttcgttttcaaaattgttctctcttctttcctagttctttttgaatttcctcactgggtaaaaaccctgaggctgaggcctttgtccctttcccacttgtctgccttctcaacagcgtatcccttctttcagctttgactctcatctttgtgtaggtaatacttcacctcttaatccaaagctctgttcttamatttgtcgccacatattcaatgacttcaaattttaagtctgtaccctgatattcattcttttctccaattcaacctattttgcgtactgttatgagagtaattttagagttttaatttgaaaatagcactctcttccagaaaaccagcaggatctggaatgagcattatattaaagtcacaaactatgttatggtttatgccagcacttgcccatatggacatttttatcatacttttctctgttaagctggttatacttatttccataaagtccagaagtatgtatcctatcttagtgaatggtccctaggaagagtcagagggatagaggtaaggggcattattaagtttttttatttggacatttattttttaatgagaaaggaaaagagatacataacagaaattgggctggaaaaataccagcatatgtatgytgttagaaaatagataattcatacaggatgcaatattgaaagtattctgttaaaacaacaatgaggtcastttccccttctcagattggcagatgttaaatcaagtaattgggaaaataggaactctagcattgctagtagaagtataaattattagttcagttactttaggcagtttggtagtttctgttaaaaactgcatagctgtgatgtggtagttggatgtttgcatatctacatgaagtcgtggcattcagaaatatttgtaattacacaaataagcatgctttaaaatatatttatatttaaaagtaaaaatgcaagcaaaaatgatttcagctagctttagttagtatggatttatgttttgatagttcagctttatgttttgatagttatggacaatgaagggcaaagaaaatcatcgaggtgtatactctgaaaattgaattttttttttttgagatggagtctcgctctgtcacacaggctggagtgcagtggtgtgatctcggttcactgcaacctctgcctcccgggttcaagccattctcctgcctcagcctcccgagtagctgggattacaggcacccgccaccatgcgtggctaatttttgtttttagtagagatggggtttcaccatgttggctgggctggtcttgaactcctgacctcagatgatctgcccgctgtggccacccaaagtgctgggattacaggcgtgagccaccgcacctggtctgaacattgaatttcaaagtaagatgaaatgcttatgaatttcagcgaacattgaattgggtagattgaacaatactagtaaggaagttgagttagtatttggcagatataaatattaagttttagaactgaatgacaaaacctctgttaaaatgggggcacatgtttttatgatccttcagtattgcatttggttttaattttaaaagctaacatatttacaattcacttaagctaaaatcaaggtggaaagtatgtttaattttttcctttgggcttctcaggcagccccttagttatttttgatttcttcattattaaaaatttttttctaggtgatgattatcagtgagttttagtttttttttttaaattttatttttatttatttatttatttttgaggtggagtctcactctgtcacccaggttggagtgcagtggtgtgatctcagctcaatgcaacctctgcctcctgggttcaagtcgttctcctgcctcagccccccatgtagctgggacttacaggcacgtgccaccacacctggctaatttttgtatttttagtaagatgggaatttaccatgtcagccaggatggtctcgacctcctgaccttgtgatacgcctgcttcggcctcccaaattgctgggattacaggcgtgagccactgcacccagcccagttttgtttttttaaaagcaagtgaaaaaggtaccaataactatatgtcataacatttttgtgacctaatatttatattgaaatgtgcatcagtcattgataactttgtccatgatctgtaattaacaaactcatgctgttaatttatagttttattaatatttggatgaaattcactgaaagaacaagaattagattctgaggggtttagtctcctggacttttagctgcatatttccagaccttactcttttatagagaagtctacctacctcaaagtcagctaatccatgaaatgactaccaaatagaattcagccttttttatgaggcaatatgtaggccagctaaaagggagggggggcactattttagtccaaagataaatgtcactttgaaagaaatttgctgaagatatttgtgggtttctttgagttttaaaaagttatttaaaagaaatcaggctgggcgtggtggctcatgcccgtaatcccagcactttgggaggccaaagcaggtggatcagttgaggtcaggagcttgagaccagcctggccaacatggtgaaacactgtctctactaaaaatacaaaaattagccaggagtggtggcgggcacctgtaatcccagctactcgggaggctgaggcaggagaatcgcttgaacccaggaggtggaggttgcagtgagccgagatcatgccgctgcactccagcctgggtgacagagcgagactcttgtctcaaaaaaaaaaaaaaaagaaagtaatagtaaaaggctgtactacttccttcttgtgatatttgaaatgaagaaaaattatgaccatataagctgaaagcctaattatagaatttgtgtgagggagctcaatcatgttaaatcctatataaattaaggttatattttatagttgcctgtctgtgccttttcacctttaagtcatttgctagtaagagaaatgcttaagaaaggtgagtaaacagatgtatttataaaaatagttattaattactgatatctctcagtgaggtacatagctttcacatagagatactgttagtacagttttaccctgaaatctactcaggtgcaaaattgctttggttatgaaacacattacttgtgagtcatcactgcacttagtgattttctgaccccctacaacgtagtagaagcaaaatgttaatgtaccttgacttccatttgggagtgtcctctgcttgatatgttaaattcattataaagaaatgtttatagtaaaagcattactttcgaaacatagaactgtagatgttgcataatgaataaaactgatagctttcaggattaagaaatatatttttgcctatttatttctggtacaggcttctaaaaaagatttttaaaattgtcttcttgatgaggatattttgagtgacatagacmcgtccttcaattcttgatggtaaactttctgaagagcaatttttaagctctatgaggaacttacaaagtattcatacctttttaggaatctaagttcacaaaataaactgaagtgttagaaagatttatttcctattatttttggtacagtgttatgcatactagagaaaaatggagaaaaacgcatgttcaacattagtgggatagttaagtaaattgtggtacattcatatgagggtctcttatttagtcatttaaaatgtttgcaggtactttttaggatataaggtaatgttataacggccaaaagttagaatacagaattttctatgcagtatgatctcaagctatttaaaaagctcagaaaaagtaatagaaggaaataagccaaaatgacattagcagttgtggtttatgagaacgagcattgtttttcctgcctccttttgttacttttaagatttcccccccattataagtgggaaacgtctaaaacagtaaaaaacattccatagttttgaaaatcaaaggaaccacatctgttaagttttgaacttgtaaatctctactgtctactcttctaatatcctgattctggttgtataagaacagtaagcaccattacattgaaagaaaagtatgaaaataggttatgtatgaatttgcacagctcctgtttatcagcattgtctaatcatattcactggtacccttaaacatcaaactttaaaaatttaaaactatgcttgatatatctccctagtaaatgttacatatttctctgccatattaaaacattgtaatcaatagagtttaacatttcttgttcaacttatgtgtattttaaggatgcattattatactgcactgtaatacagtgatgctgtaagacaagtgctggcacactttccctgaaaggccaaatagtaaatattttcagcttttggggttctctagtcackactacaacttctcagttcagtggtggtagcaaaatagctgcaaacaataggtaaatagatgtggcagtcttccaataaaactttatttacaaaaagaggaggtccctgctgtagtttgcgtagccctacactaaaatatatttattggtaagttctctcatgccttgattggttctgctttaaccagtactcttaagggtgggtttgttcttttgtggatttttgtatcttgtatcagttgactgttcttcatgtctctactttagctatcctccttcactcttaccttctgtatccagttctgcttagctttttcaaaaaattgtggttaaatatacataacataaaaattaccactttaaccatttttaagttccctagttcagtggcattaaatacttctgttagttttagaacccagatgaatatgctaatgtgtaaaataaaagtatgtaagttgtgagtgaataaagtttatgatctcactttagtgtagtgatttggaggacatctatttttagcaactcaaaaactgagaattaagcttggaagtaactttaaagaacatttaattccagctcattttacgtattatataagctgcccgcagatattaaatgacctaaacaagttcagacagtattaggacttgttttgattttttatttttcatctattagcagcaaactaattcaatttatagagttaatttttttagattgaggattataagagatcttacaaacccttctccccagctgctgctttcttctcttctgttacatactccctataggttgttgttattcatctctacctgaatactgccttcacaagggagttcactcccttagaaggcagcccattccgttttcatagctgtttcatttttccttatgtgtggctgaagtttttcattaacttctacctatatatgttagttattctgaacaagttgtctatagtggtatcagagtgattgcagtgacagaattcatatagtatctgtattattccatctagactgatatattaaaggatacttggctgaagaaatgagttattggaaaaactaacagagttggatgttatagacttgatctccccagatcctagtcttcccacccgagacagccagactgccttttgggtcaaacttctgaagttgtgcaaacgtatggacaaattaccatgagctgacaggggcagcctgaccatttcctcacataaagtggcttttgtgctttttactttggtgtgctattaaatgaatttgtgctataaagtccagtcaaaacagcagcactaattgaatataatctcatctttgctttgacaggatgcagttttatcaaggcagaccagtttagttctcttatgtgcattttggttagaaatttattattgtttaagaattacagatattattcctaaaatagagtgctaaccactgagagcatgaggtggcagagcaggaagagtctggaactgggaacaaaggacgagctttgtaggactaattctggtccagccacttaagatttatgtgacattggacattctgcttgacttggatactcttaaaacaaaattttttttaaatttaaaatttaaattaacattttctttctttttttagaaatggaatcttgctgtgtcacccaggctggagtacattggtgccattatagctcactgcagccttgaactcctgggctcaagcagtcctcttgcctcagtctcccaagtagctgggactgtaggtgcatgccaccacactcttctaggactctcttttatctgtacactggggacaattaacccaccttaatttacctcatagggttttaatatgatagaaagtgagagtccttttttagcagtaaagccttaaaagatgtaagtttttatttttaaattcaaccaatgattagccttggggcaaaatcacttggatgataactagaatttgtcaatttgttagacttaacattcattctcatatgctattttactatatggtcagccaccatcaattcaactttctatctaacaggtttattaatctgccagtttgctggtgttgatagacggttgttatcagtcagctcactataaattcaaaatgatamactgattttaaaacaaccctgaattatcatctgaaggatcattattcttaaatgaaggcataaagactagcaaatccttttgtattgtgttattattaggcctcattttttttaatcccacttgaaaagacagtttttcattgtctcataggtttaccatactatactatgtgttttaagagttatgcgaaaaaaaaawtaagaaagacttgaccccagccttgaagctttatagtttggggaggttaggtaatatgaaatgttatttaacaaaataagaccatacagttggtttcaattattttcctctgttcattttgtagttcttagtaaggatttttttttttattttcttcctttcatttgatagttttttatttataagatttttgaactgatgaagatgagtttgccttgttgctcctaattacagattagaaactttcttgatttcccctaccgattaaggcaaaattaaatacttcatctgtacttgctaataaaatactttttgaaaaacacttctaccatagtatttgtctcatggctttagtcatatttctcctagaccacaaccttactttagggatctttattgctattgcttggcatataataagtggtacaagaaaaggacaaaacttagtgataccagagaatgctaaagagtatagagaatctggtgggggcaaagtcctgtgaaacaattgaaatgatcattgatagcttaagatttagggagaggaaggttttacacagaaggcatgataggttaaaaaaaaaaaagatgagatagcacttatttacaggtcattgagtctagtcaattacattggggaattataaggattaagttaggaataaatagtgtaaaactaatttatagagaactgcataccagactgaggagtatgaattccccctttggtatggggaaactaatttggtcagtggggtaagcaaagacagttcctcttttcgtgttgcagaagttggccctgcatttaaacttaatgtagattttggaaggtagtctcctcatttacctcagatatatatattcagaatatatatattctcaacactaaaaaattaagtattcatataatagcctataggtagaaacaggcaccttaattcacacattctgtgctctagctgttttttgttctttataaacactaagtgaatgcttactttcatccctttggtctgtttgccagaaatctttttctgttgccatgcttccagctcttacccatctttcaggtttagctcagattccacctcatctaaaaaaaagcttgaccttattagaccacagtgaagtagttttccaaagtctggatgtcatagatctattcttgtaattcctcattttatgtacatgtctcctacttcttctagactgtaaatgatgtctaacatgatgtcatacatggcatgggatttttcttctttttcattaagaaattattttttaagacagttaaaggctaaagtaggggaaggaatgggtaaaagaagaaacaatatgatggtaagatgatcttaaaggcagcatttagaaaggaaacgagagagacagtataagttggagaagaagtaaaaaggtgagaaataaggattttccttcagattatcttctgttatatcctatttgaattgctgaatatcataaccattttatgtttttctcttcaggggaatctggaggattcatttgggttattaataattgttgatgataagatttgaaagattgctataatcctatttgtcattaaaacttaaatacttctctcaaggatttcctagttactatatagttaccaaaagctatagtttttagcttttgaattttaatgaaaaatacattattgtgaagaattaccagaaagaattaatttagggagagaaaaggggggttaaggcatgaatgatcttgagtagtttctgccttgtggaaagtttgaggagaatatttgagtatgtttgttcgccagactgttgaagcgaattcattctcagatcaaaatctgaggtttcaaatgctgaaataggtagtaatttctttttatcagttttgacagcttattttgtgagcttattttttagggctggcttaaattctttcccctatagataaaaattaatttcttgtttaaaagcaagtaaacatttgtctttttttgctagctttggcaataacgtggtcattttaattttttttcactatgtgccataagctaaaaaagtgtatattttacgttatttacatagcttttaggcaaagcaaataccatttacttgtgtgataaatacatagaaagcttattctgcagttttttaaagtgacaaactaccactatctgaagtttatttgaccaaccatttgctgtaaataattggtatgttattatccactgattttttgacagctggttcagttttttctttgaatattaggtggtgagtattgttaagctgtgtttaatggtattaggtcaggataagacctagaaaacttgtttgtaccttataaaagtaataacaagctagtaagttagagagccagtataatgtagcagtagtttggattcagaaaaatccatctttgccattgtgtaaccttggaaagcttcttaacctctgagcctctgtttcctaatctgtgaaatggggacagaggtagtcatttttttgaacaaataacaaatttgttgagcttctaagtatgtaccagaaatcatactatgttttggataacagtagtacctctgtcataaaatccttggaggattaagttagaatgcatgtaaaacacttagcacagtgtgtagaatataagtaagtgatcaatatattgtagttattattactaaaacatcccaaatgtattttttttggagacagagtctcgctctgttacccactctggagtgtggtggcacgatcttggctcactgcaacctccacctcccgggttcaagctattctcctgcctcagcctcccaagtagccgggattcaggcgcctgccacaacgtctggctagtttttctatttttagtagagatggggtttcaccgtgttggccaggctgatctcgaactcctgacctcaagtgatcctcctgcctcagcctcccaaagtgctgggattataggcgtgagctgccacgcccagcttcaaatgcatttttagaagttgtctaagagcaaaaacagtttcagggaataattatgtatcaggatatgtcattaaatattttaatgataaagctatgtgtttttaaaaaacatttgtgtgacattcagtatttaaaagtttggttaatcatagcatcttagtgttacactagtttagttaattaagatttttaatgcatacttattggtaacgtttttcttttaatagtctttatgatttgtagaatttgatgtatacagtcttgccttgtccttctgtatatgttaagagattggttccaggtcccccacagctcaagtctcttatgtaaaatggcataatatttgcctataacctacatatatcctcccatatattttaaatcatctctagattacttataatacctaataaaatgtaaatgctatgtaaataagtcttatactatcttttgaatgtacgttttttattttttttctgaatattttttatccgtgttggttgaatctatggatgcaaagggctgactaggatatgtaaacctagatcactttagaaataataactacaactactgtcagtggagtcttactctctgccagacatgttctaaagatattgaatgtattgagtcaactgatcctcaccacaaccctatgagggaggcactgttttattccctttctcagatgaggaaactggatcacagaaaggttaattaatttacccaaggttacacaactatagtattacagccaggattcaagaacttgtgcacttgatcttaactactgtgtagtagttaattgctatctctcccagattttataatcaggttaactatttgaataatatgtaaatatagtcatcatatttagaaaatccccaaaacaactgaacagagtgttgagtcttatcggaacgtttgctgaactctataatttgtattggatgattgtactggggtgtataggaaggcatcaccataacggatggctgggcattagcacarctagagttgatgatcagggtttcaaaacctgggattaaaaaatgtgttaatgatttttttctacttgtttttcagtgtggtttatagtggtactgatttgattttggtaaatcaacatttattatgactgtagtcttgagtatatgagctcagctgtagtctagtttagtggttatttaacaatggatttagttaaaaatccagtagaatgttcatacaaggattaattttgtgttctttctacctctttagtaaaataaaacagggtctgttacctagcttggaagatttgctgttctatacaattgctgaaggacaagagaaaatacctgttcataaatttattacagtaagtttttatatttttctatcttaacttaaaaaaatcaataataataaatatatacagtattattgaaatatagtcttaaaggtcgtctgacatgtagattctgactgacaatatttctcttattatgttttcaaatttttgtcatgctcatttcaaggtaatcagtgaaagaaaaagaaagaaacaatgagaaacttgtccagaaagtgggtaatagtgacactaagatgccatattcatgttcaagtgttgggtagaagtttttatatacaggaataaaatcttatagttggtataagcatatacattatttgcactatatatttacaaactcttatttttttaaaaacaggcactcaaatctacaggattgcgaacgtctgatcccaggttgaaagagtgtatggatatgttaagattaactcttcaaacaacatcagatggtgtcatgctagacaaagatctttttaaaaagtaaaagtttctgccaaacctttaatggtgatttgctatgctatacggtgattctgcttttaaaacaaaattgcatctttgaaggccactgyttcctgtgtaatggaaaaaggggatttataaacatcatttgtttgaagaacttggtacatattaggttctataatacaccgggctaagagtattctttctttaaatctgttctaagcaaatttagccaccgatgtttccagtttacagtacttggagattgcattcagtttgagtagagcacatcctttgtcctgtcattgcttatattgatccccaattcatctgcatgacttgcacgctttctcagcatggtctctagttcttttccacaaggtgatttaggtgacatcataaaatgagagggcttcagacagacctgtgttcctcacatttacatacctgcattgtctgctcctctcctctcttcagacatattgatacataggcttttggctattttcattttcttcaaaacagtaaagaactaaaggcaactttggcgattaaagccttgatttggttgaatgagaatttttactttgatgttcctgtatttgcatatatttattatttatcttcattaatgtgtttctattagtttgattacttaaagatttaatggacatgtgtgtaatggatcccaaagaatcaaatagtattttaaactactactatttaagtagaaactagtataaaactgtaaatactactataagacattggctttttccagacatggatccaaaaaatttctgcatctactttgaaagtttgttatgtatggttgtatttacttttgttttatcttcttttgggggttgggtgatttgttctagatgtctcctggagtatgaagtcatctgaaggtataagtatttaactgtggttctctgaagtttcctggcatgctgtgaagcactgctgacagcttgggtttcttatcttttcacgaggaggttcttgtttctgttaacttagctgaccttaaagtgtagactttaggtccgtgttgcagttggtattaggaattttgacttccagaacctgctttttaagagacagaaaaacatcatttctaaatttatttgtgtctttgcggtaaggattatttttcgtgttcatgaactgtctgcacaatattctgattaaagtgctttctgtgggcattattttgttgtatctgtgaatgaagttgttagagtaatggttggtagatctgttgataatcagtaggggaactgctttggaattttaagtggaagcagtattttacactttttttttttaagagacagagtctcattctgtcgcccaggctggagtgtagtgacatgatcttggctcactacaacctctgcctcccgggttcaagtgattctcccacctaaattcccaagtatctgggattaagggcgcctgccaccatgcctggcttttttgtatttttagtgagacggggtttcaccacgttgtccaggctggtctcgaactcctgacctcaggtaatccatccgcctcggcctcctaaagttacacggttttaatacttgaaaaaatatttatgttttgtaaacatgttgttatgtttaaatatgaaattaaaaacaatttaaatcctctgattattaagccagggaactgcaaacattaaattttctgcctgcaattaagagatagtaattattgttttaaacactaatccaatttttaaaaatctatgcttgtaatacaggcagtttccaacttgacaaatgttttatggtctatatgagcaaccagtagaaaagtacaagtctctagggcataattatttctctttattcttagaatgaggtggttcaaaacctccaactgttaaccttttaatagctttcagtcacctggaaaggtgattgcttcagagatgttcttttctctgttttcaaatataagaagttacctagttagtgttgccagaaataaacttctccctttcatgcagctagggaggagatgttaaaacrtgggattcatttttccccagagaaataatttataaaggtgggtaggtttggttgaagcagtgtgttaatattttacctaaaatacattgtagattaatatttttagactttttcggtaatctgagaaaactattatgtgtgactttttttaacttgggaaaatacgttctaagcatactttttggagtaaaacctgttcgaaagttggagactgcctgtacccaggttgatagtcaattgtttttaatgctagtaaatcttaacactaatacaagtaaaaatatttgtgtggaaaactaatcctttctttattcgtgcatttttaactttataggtattaaaactttctttgtatgatcataattttttgatctttttgttttgcaagaaagtgaatggtagcctttcatttgtatgtttgattttcttaaaaatttcatatttattatgttattttacaaatgaaaaattatttgtgagaaatgttttgtcaatcattgtgcattagtttttagttataaacacttaaggaaagaaaatgattattcccggcttacagataagaaaactgaacaaaggacagagatatatataacttgctgaaaagcataagcacctcctcagagttcattttatatgacttctcatttcctagttagactcatggtatctatattaaaataactcccaagaaaaaccttactgtttggaatggtgatcggtatgcagttagatactctcctgagaggcaaaattggctttgtcagcctgttaatattaccagtgaaggctgttggaacagctttaccagcaccttctgctagagcagaacatttgtaaagtttcactgagtgtataattttgttaattataaatcctttttttttgagatggagttttgctcttgttgcccaggctggagtgcaatggcgcgatcttggctcaccgcaacctccgcctcccaggttcaagcaattctcctgcctcagcctcccgastagctgggattacaggcatgcamcaccacgcccggctaattttgtatttttagtagagacagggtttctccatgttgaggctggtctcgaactcctgacctcaggtgatctgcctgcctcagcctcccaaagtgctgggattataggcgtgagccaccgtgcctggctaattataaattcttttaaaggtactgattaaaatagttaaatggtagtaggttaataatttaaatttgttcagcagctctcatttttgcatttataacttcttgaaaaatgaggaagtgcatttgatttgttgtagatataaatactggtttaagatcaggaattctatttttctttcctctgagaaaggtgttctttgatgtacatctcttgcaactctgatacttggaagttggattttagaagctatttgaaacattaaaaatattaaaataatggtaatacttttgagattaatattgaaactatctgaaaatgattgcttattgaagtaaatatttcttagctctggggtgtcaatactatataagttatggaaattaggactgtaatttttttaatgttgtaatagggagatccttatgactgaaacaatagtcatttctattaggattttatttttaaactgttaattttatattgaacaaatgagtatatattattctgaattcttattaatagttaaactgtgaaacctggcttttagctttaatttggtttcatctagaacaacttgaattaaaatattgacatttaaaaatttctcatttattacagactaaacaagaaatactgagagtatcttactcttaagatttattatcgttggtattatggcttaacaccgtgtttagcaagtcttcctttgttaattaaatattaattaaatattctattactgcattacagagacttaagaagctcagaatatacaattggctgtaatccatttgcaaaacgttttaaaggctacgttaatatactgattttctggcttaaattctttttagcaaaaagcagaatacagttcaaattattagatttcagaatatcatgctctcccatccacttggtttactatatttttaaaatacttttttaacagtgaaacatttttattctgcattatatttacatatcttacattaaatagcatattgtaatataacatttttggtgactcaaataatataaaattaattattacactacttcatatgaaattttatttcaaattagagattatttttacaagcatatcaagacatttcatttaagacataaattaatctgactaaacaaagttgatataattaaggaaaatatgttataatgcaaaatgtttaatttttgaatgaaatgctagtaatagttatataagaactaagagatgtatttctgagattacttggtaaataaacaagatctcaaccttggcagtctgaattttgttaaccagatgtcgtcatgctgaatgttaccaactctgattgagtaagaagcttgtttcagatggtcttaatacttaaacctggtggaacgccttgtcttaatttgtgacacaattttaggcacatccagattaatctcttacacgttcaacagcttacaagcaactacttgaaagactgctagaaggaaagataatgtagaaagcataatttatagaatttagttgtataaaatgataaatttatctattatttaaayagtgtcctaattattactgttattaccaagttctgatatttgaaatgtacccagtttattaattatctttttacattctacagatgtgttcagagcaacattgttttgttgacacaagcatttagaagaaagtttgtgattcctgactttatgtcttttacctcacacattgatgagttatatgaaagtgctaaaaagcagtctggaggaaaggtaatgcttttgatgtacatattttcataaccgaatcacttaataaattcagcttaatttgaggtctagagagtaaattgtgtagttgtgttttgctaaagaaaacactttagcttcgcttaagaaatttaagtgaagccactggatttagtgtttttacggtattttaaatatttaactttgttattctggttaaagagaaatctaagggtaagaattttttattttcagatgatggtgatggattttaaatttttaagttaaaaaatcttattcagaatttctgcagatctgatatccttcagtattaaacgaaatgtttctagtttttaaaatcctgtaaataatactaggaactatttgattttcatatagaaagttttcattttcttttgttttaactttgggtagctttagtataatccagttggcccttgaacaaagcaggggttagggatgccaaacccacacgcagtcaaaaatctgagtataacttttgactcccttaaaacttaactacttataactactgttataagcgttaccgataacataaatagtctattaacacattttgtatatttattatataccgaattcttacaataaagaggataaaaaatggtattgagatcataaggaaaatatatttactgtttattaagtggaagtggatcaccatgaaagttttcattgtcatcatcttcatgtttagactgaagaagaagaggagggattggtcttgtgtcttgggggtggcggaagcagaaaagaatctgcatataattgcactgtttgaagtttaaatccatgttcaagattcaagtgtataacaacttcagtgtaaatacttactacttacttttaaatacttgattcctaatgttttagtgaaaccctactagcacccatgaccctgattaaataaatttacttttttcctgcttaaaaaaaaaaaaagttcaagttcctctgctagactctcctgctaaacatgagaaagaaagaatgcattggaaaataagaaataatagagactgagaaaagtcactttagatctcataattctcaagtctgttttgcctttagttttcatgagcattgttacagaagatagactatgaagccactgagtgttgtagaataactagtcattggtagaaggtaaaatgagataagaaatttgttggtggaagaaaatacattatttgtcaatattatatctattcatttctttccaatcttttggataggttgcagattatattcctcaactggccaaattcagtcccgatttgtggggtgtgtctgtttgtacagtagatggacagaggtaagtttatttcaaattcatgaaaaccaactctaagccttaacttttgtataatggtgagaatgacatggagaagatcatcttttatartggaaattagtcctaacaggatataatttcaaaaggtaaataaatttaaattttaakgtaatttttaaaaactcaaacagtaacattatattaagttttatgagacatctattttattcacagttgtagtcttgttttttgagtattattcaaatrcctgcagttaccaatttgtttcagaaaagcaggcttgtcaaaacatgacactattctctaatgaactgactactaataaaattagtccctatttctcaacttaacattggtaacccatctgtcgttgtctttgttccttgtgttcctgataaaattagcatgagaattaagacagtgcaacataacgtatcccaaagttaaaagtcagttgcaaaacatgtaggatttcatgaagtccatgaaagcagcatttgggaattgcttacattgcaggcacagctgctgacagatgaggaacttgcagaattataaaaaggatagtgatgtgagggcgctttagaaagaatgatttgatttaaaaatcaaagaattaagagaggcccttggaaaatggtaaagttctagaatattttttcaagaatgaccgtgttcattgtgctgggaattagacataaagattgttatcatcttataatttggttttattagaaaattacgccaaagagaaaaatcaatattcttttttcactcatttttaaagacttagctcagagatatattcctttgttttttgtttttttattaaagtatttctgttttatcaaaatagaacttacataagatgtacaacttgtaagtgaacacagcttgaaaagtttatatcagagttgtaattttacctaaatttcgttaaaactactaaaagccgtttaacctagtaattttagattttacttttcaagataatgttgcaattaaaaaccytttttccttttatgaaaatttgatcttttatgttgcccaggttagttttgaactcttggcctcaagtgatcttcctgccttggcatcccaaagtgctgggattataggcatgagcccctgccccccagccaaaaatctgtgactcgtaaggaccttcattttaggtgattttaatttttttttactaattatcctcaagtacttacagtaaaaaatatatgggttagcccattcattttgaaagtaaggaatctgaggaccatagttgacatgatattggcaaaggtgaaatgaacacctaggtctcttaacttctagtctattttttctttcattattatatgcctttatcctcatttgggtcagtaaaatgtactgagcagtcaccatgtgttgaattaaatgttgtgtgctatgaagggacacaatgaaatgaaaaggcatggtgactttatcccttgaagcaaattccggtagggaatggtattcctgtttttgcattttaggaaataatttatcaagtaatggaagtctttgaatttgaagaaaattattatcatgtaatattgaatatgatttttctcttcttaaacattctctatgtctcttagtttttttatctagagaattcagaaagttgacttcagaactagaacatatgtatttttaaatccaaaggtagtaagacaagctcttaatcattttttagaatgattgtcaagtttgaagtaacaatcttatatagtataactatatagtttaagattatagttacacatgaataaatttgataggaaaaaaatatagtgcccagtttcattatgaatgactttcactatgaatgaatgctttgtgatgtgttgggacattgttcagggaacctgggaggtatcagtaagtaaatcaaagatctctgcctttgtgaagcttacattataattgggttggccagaactttttcattcccaaatcttttctctacttcatgtacttctcagtttggtggtaatataaagctttctttttgctctgttatttatctgcatggtaatgatgactgcctactgaacttagtgccagctctgtcatgtttataaaactggatgcttttttttttaatggggcccaggattgtgagtggatgtggcttgcaatatgaggcatttgtagacagggtcccagagaatagtattgaatctaaactgagttctgtttaactttttaaccatggtttagtcacagcttacagctctgagttgaaaaaaaggtgaataatttctaaaagggctagtttattttatgtgattgaatacacgtgggagtaaggaggagcatgctcttactctcttgccctcagaggaaaatttccacattacatatttattatctactttaaaaccattattctgttacgtgaatactttcatgcttttgctttttttcacagtatttctcttaaaataaacataggtcaattctgtatccatggggtctgcacccatggattccaccaaccacagatcgaaaatatttgagccaaaaaagatggatagttgtggctgtagtaaacatgtacagacattttttccttgtcattattccctaaataatacagtacacctatttatatggcatttacattgtatttggtattataagtaatctagagatgatttaaaacacatgggaagatgtgtgtaggttatatgcaaatgctatatcattgtatataagggacttgagtgtccatggagtttggtatcacagggattcctggaatccacctcccacagatatcaaaggatgactgtacttaaatttattctgtaattttgacataaacttgtggttgaattatgggaaaatttttgttggaattgttaacatgtaaaaagaataattccaactatgcagttacatttttttcccagttgatgttattttttaaaaatctccttttaaataggcattctactggagataccaaagttcccttctgtcttcagtcctgtgtaaaacctttgaaatatgccattgctgttaatgatcttggaactgaatatgtgcatcgatatgttggaaaagagccgagtggactaagattcaacaaactatttttgaatgaagatggtaagaattacataaacattggttgaaaaaagaaatgtctcattttcctatgtaaatctaagtcgttttaaacattttttgattaaaattaaaagtatttgtcatgtgatttctatataatccattgagagagtttcatcacctacttttaaaaatgattattttaggcatctcataccactggraagtgggctagggagaacatgarcttctctcttcataaccacctttagggaaatatagcgaaatctcaaaatacatgagatttgctttaaaataatttagttaaggcagctgggagtgctgggtatgattattactatatgttggtaattattgcagctaaatgataggtgcatgggtgtttgtatattattctatctattatattgtatatagtagttgaaagttttattgtggccctggttgagatagtgaggattattatttttcagtgagtgtttttactttttatccttataacattaaaaaatttgaaagaaatgctttgtgtttaatgcttggttaacaaatctttttacaggaattcaaaagaaaaggggaggacaaaagtagttagtttgatctgatagagattttaagtctaaacatcatttagctgagtgcaaactaagttaaactagtcccatggtttggtttctgttttttaatcttctaagcatatgctgtgtttctgattgatgagttaagatatagaaktgaagaaagtgagagcgaagtttgtagtaatggctgtgagagatacacttttgtactttttttttctgctgtataaaaaatgaaatgtgccttatactcattattttattagtttgtaagatgaagtcataagactggtattttcttatgcttctcatcctatttattttgagagcagttacattttctttcccattttaccgtaacctttttattctgatgctacgtttggttttatggacattactgtaaattaacaacttcaataaggacatcatatrcagaagcactttatttactaagctcattgacatctagatttaatattgaaagaattaatactgttattctaaaaataccaaatattttaaaagaaaaatttaatacttttccatgaacagcaaaggagaatagacatgtctagtgaattgatggatttcgagggagatatttaagaaaaaacaaatatagtaatttgaatgtttagaggatttcagaaacaaaaaaacaaaatgggcttggagcaaatgaaattaacagtataagtaatgaatttttttgccatatatatttatggttttaggaatcatgaattattgatactgtattctatataagaaaaaatgacaaatcagagatttagaattgtttataataagaataaaacataaagtttaacaagagattttgcctcgatattcatagacgttttctaagcctgagccaacaccctgagtcttgaaagtaacagtaaatacaggcttcactatattacaccttcctgaattctgattagagcctgtgctcttgagtcctgatttagtttagcccagcaaaaacaatttgaagatctcgttcatatttaaaattgcaagggtagatttttggtgaaaccatacactttttgtgtgtgtatgtatatatgtgtgtatctaaaataataaatttttaaaaaataaatatattactgttacaccagctttataagattgtgatgatttattaagactaatagggatatggtaaatagaraaattgtagtagttttttttttttttttgagatggtgtctggctctgtcccccaggctggagtgcagtggcatgatctcggcttactgcaagctctgccccccgggttcacgccattcccctgcctcagcgagtagctgggactacaggcacccgccagcacgcctggctaattttttgtatttttagtagagatggggtttcactgtgttagccaggatggtctcgatctcctgacctcgtgatctgcccgcctcggcctcccaaagtgctgggattacaggcttgagccactgcacccggcagtagtttttaataacagtagttttttttttttttttgagacggagtttcactcttgttgcccaggctggagtgcartggcgcaatctcggctcggcgcaatctcggctcaccgcaacctccgcctcccgggttcaagcgattctcctgcctcagcctcccgagtagctgggattacaggcatgtgccaccaccctggctaattttgtattttcagtagagacggggtttctccatgttggtcaggctggtcgcgaactcccaacctcaggtgatctgcctgcctcagcctcccaaagtgctgggattacaggcgtgagccaccacacctggcaataacagtagttttaaaatgtttgcaacatagaaagttttggtaggaggtggctgatattttttatcattawaagtgagcaaacaagttactttatggagatgtcagttttgcaaactaccatctcccagggaagtctttttctaccttgtagtgatcgggttaatcaacaaattatttatatagctttccttgtctgtattgttaacagctctggagggtacatgggccttgcttcttggaataacttttctgactacaggatacagaaggcaattacatatttctaatacataatgggagaagacatacttaagcattgaatactgttagttgtattatcttacaagtatgtaattgacaggtgccaaaatgtatgtgctgattatatgtgtggaggattgagaaaaaagaggagttgagttaatttacatgaggatgacaggactgaattgataggatgaattgtggatggttgggaagaatgtgagagggcactgcacattttttycaaccatcctcaatgggcactgcacattcttcgtaaccatatatatcccaaccagatggagaatattttctctatatctagagaatatattgtaaatgtgtgtaatgtcagataattgagtttccttaactccagtttttatttggcactgtaaaattccaatataataccgaaaatataaatatccaaattaaattggaaatcctttttaatatttttcgttctttagtatatgtattagcaaactttgcctcagcctcacctgtgaacaaaacccttgtaaggttcatatgcttagcagcttgaaaagcttcttttgatataatatgaaagaatgctgtgtattttattgcctttggggaaaataaatacttgttaaaattgatctttttttgcattatagtttaaagcatgttcataaatttcagatgtcacccatgtccattttgtcagtataacacgctctgatatttcgttactttaaatgatagcctttattagtgttgtaggttatttctgccattcaaaacttttttaaattaaaaattctaaattaaacccatcaactccatcttaccttaagacagagcagggaagcaagaaaatttcacggtcataggtcttaggccgaggttttatactgcagttaggctggtggtgtgttacattctctctggcgggtttccggatgttcagatgtctggcttttgagccaaaggcagaatgagcaattacatacatctgaaaattgggctgtcatgccttaaaatgatttagtgttctttaagacatcttgagtgtagtatatgtagcatttgcagagtatttatcatttggaaaatatttaatactcacatttatgtgataccatttggagtacatagattagcagtcttctaggactgtagagtctaagcctgataatgtcaaaagctctgaaatgacagataataaacatccatacaaataaaagtataaactaatttatactaatttaaactaatttaaactaatttgggataggcaaatcttgattgtaataatcagatataacacaaagattttattttaacttttgaaacttggcattatgaatacacccaaaatgtaggatatttttctttttatttatttatttttaattgacagattaaaaattgtgtatatggtatacaacatagtgatttgaaatatatatgcattgtggaatggctaaatcaaagtaacatacattacttcatatatttatttgtaatgagaagacaaagtatgctttcttaacaattttcaagtacatataatacttgttattaattacatcatgttataaaatagatctcttgaacttattccccctgtgtaactgaaattatgtgtcctttgaccaacatctggcaatcccttctcccccctcccccacttctggtaaccaccaggtagataaattaagatgttgaggttcgcttgtaaatagatgttttcactgtccccaagattttatttttggtgcttgtgtcatgcagtgaatgagaatataatcagttgagttttgaaattcttatttattgtaagaattaggagaagaaataggagtttggattaatgtaaagttttaagtaactttaaaattatataagaaatacaaatatacctttattgtcaggaaatacagaaagcctaaaaatatcccctataggctgtgcatggtggctcatgcctataatcccagcactttgggaggccaaggcgggaggattgcttgagtcctggagtttgagtccagcctgggcaacatagggagatcctgtctctacagaaaataaaacattagccaggtgtggtatgtgcctgtggtcccagcttctttggagtctgaggctggaggatcacttaagcctgggaggtcaaggcttcagtgagccatgattgtgccactgcacttcagcctgggcgacagtctgaaactttggctyttaaaaaaaaaatcccttataattttattattctatgtaaatcacttgtttgtgttttgaaatccttctgtgtatgtgcttgtatataaagataaaaataaagcactaagaaaaaagcaaaattgagtacgttagctgtgctttttccaaggtcatttttagtatagtaatattactcaagtgtttaagtatttgaaataatggtattgcttttatattttacagataaaccacataatcctatggtaaatgctggagcaattgttgtgacttcactaataaaggtaaaatgttgatgtttcattttaacctagtaaaactttttttttttaacagctaaggcataaagatgaatctgggattatttatgtagaattatgaaaaattttctcttggtgttaagaaatttgtcttatggtatagtgttaggatctttatttcaaaataaatgatgtagtcatttcaaggcaaaattaaaacagatgactcattgtaaattccaacagtcatttactcttgacttgaagatctggaaaatatttaaagtctgctgaagaaaggcatagaggctttttttttttttttaaagttttgatatttttcctttcgtttccttttggttcttccagaatgaacagttataaatagaattaaaggcattttactgtatatttgttattagtatatgtgggaacaaatgttctggtacttaagacaaagtacatttaccctcaaatattctcaagtctttgatactctcatgagctgaaatcacagtttttattggaacttgtttcatttggttttacttaaatcatgccataattaaaataaataaggcttattccaattatggagttatattttcttatgctttgaaatttgcattgtaagggttttttttttttttagtgtttggtttgccttaataattggaagatctagtattttaaaataagtatttgaaaatggttcctgtgtgatagatttttaaatctaccacacgattttagatgtttcagatttttaatttctaattataaattttatttatatttaaataaattttatttatgtttggaacatttgtatacttctttggtaaatctgtgcctatctattccaagttagaggaaagcataactacatggccttgtaaatgcattactgtggataaggtaccctggttacatgaaggatatttgagtataaatgatacccttggcccagttcacaaaatttcatctaacttgtatactagaaagcctttcttaacttttaagagttttatatctgtgagaaaaagcttttaaaatagaaggctggtatcttaagaatctatatgtttacttgttacttcaaggcaaattctttgaaagtattggcccatttaattcttataactctaatgaagtagatgttatagccaagtgtttttaaaatgtaactaattgtaataggatatggagaaagctgtcagtttgagctgaaagaaacttgaaaatgcgattatttgcaaggcacagtcctagctttaggtagcttactttgtagtgtgggatatgcaaaagtaaatgggtccttataagaaaattcaataaatgctgtgatgagagaaaagcctcattaataattgcttagatttgaacaagtaacttaaagtagaaataaggaaacacatactataatgtatgtgttaatgcttgatgacaaaaacaccaaaagtgtttcttcccagaaaaatatccacataccataattttacataaactttcaggtgttcactactcttcgaggctgatccatgggtcctagtttaagaacttttaaactgaagagagattaacatacactacgcatagtctcaaaagggcttatgtaaataattaatagaagacttccttcactgcacacagttaaaaatctttcatttaatgattcatgggtttaacagactacaccgaaatgctgcatgtgggaattgcatgtctggttatcatatcacactatcatttcattagtttcacttgccatgtttagtcatgagtcataaactatacattgagctgcattttagtatgagtgattataaacaaagttaaaagatacatacaacataagtgtggttcagtgttcaacagtgcaaaaatttaattgagtcatcttgtacctacaaatttgatcagtgattttcataaaaatttaaatttacaggcaaagttggaaatgaggcttcaggatatggtttatatttaaggtcactttctcctgagtttttgttttgtttttagcatgtgtttcacaagtgctttttttttttttttttttttatgaagttcatacaaatcttggagagcaaagcctgatataaccctatgtaaaattgaatgccccagaatatgtaatatttttcttaggatcttttagggaaaggattaaattcatataaatatctataatgtgatctctgcaaattgtatgatcacataatatttataaattggtattggtttgaaatttaggtaataaaaccatagccaaaaggccttaaaarttgtcaaacccagttctcttactttatataacggaggaaactgagaacctggcaaggttgtaacagcagtagaattggacttgaactaaatctcctgatactcaatgtgctgttcattacaattcactctgccatatttaacgtaggtgtttgccatttctcttgatgacatctttaattttagttagcatagttatattgccccaaatgcagaagtactatttccttaatttgaactggttcaaacgataacaatttattggtttaaaagttgtatctcatttgatagcaagtgttacgtagtcattcttcggacattagtcagtaaagaaacaggcccttttccaagatgcttgcatctgagtacccaaagccacggatatttcaccatggctactagaggtgaattctgtttttagctcttttaattgatgaccttaaggctatttgtgattttttttttctttcaaaattcaggaatttatcatggtgccattaaaatcattttcttcatgttaatccccccaccccaaaattaagtagagtctttagtaagactcttgatttcataattttgtagtattgatattttttccttgtaggattggtggtgatcctcaggaaatgggggaagaggcagagcaaatgttcaaaaggattagcagattgtggaaaaaaggagaatttggacagaaggagcctgttgcataaattcttaactactaagcttataggaaaactccaatatttaaaattttaaacaaagctatataggtaaatacctttttaaaaacaaatgtaattttatacttaaaatgcacataatttttaaaaatcataagggtattatacttcctctctttttctctgtggtagctactaactttaaaggaatactttttgttgtaatctgttttatttgggattgtgataatgtgtgattgcttgattaaaaggaaagaacaaaaataaatttgaaaggaacagttatttttatatgatgtagcagtatccttacgtatttgttttcttttcactggtaaaaatttcacgtagttttagtttaaaagttaagatctggtgataacttaagggttaggataggaaaatgaggacaacatactgcaaaataattgccacacttaatgctttttcatgttagaaatagtaaaagttacactgtcttctatgtttttacctctcagagttttttgttttttgttttttagagacaaggtctctctctgttgcccagtctaagtgcagtggtacagtcataacccactgcagcctcaaactcctgtgctcaagtgatcctgccacctcagactccagagtagctgagaccacaggcacaggctaccatgcagggctaattctttataaagctagggtcttgccatattgcccaggctggtcccaaactcctggcctaaagtgatcctccaagtttggcctcccaaaatgctgggatgacaggcattagccactctacttggcatgcctcattctagtggtagtttccagtttttgtcatttaaagaagttcaattttctttttaatcaaaagtatttttgaattttaaaaattagggttttttttctttctctttaaacaatttgtaatcatactcattgaaaatcaagacaagcttagttaatgtatatgtgatgttcagtttggttatgttagcaataacctgttaggcatgcttataagacaggtttttaaagtagtttgtgactctcagagtaatgcatgatgccttggacttgcaacattcagaagacaggattatattggtttatttacttcttgtttatatcagtttatgctttagttttttttttttaatgaaaggtagagcatttattgtcaactgaaaattgttctgttactttatttttagggttgatctatgaaaatactagatctagaaaaacattcttttttacctggagtgtcttattttttattttcctaatactctttagctttaaaccattttctatcataagactaaattaagagtatttcacaaaatcgtttttagttacctctttttgcctttttcctctatgatctctaatttttaattggcttgcacctccatactttatgaatggaatcaagtgcgatacttacaaaataactctgatgcattgattttaaatgagccattttattattaaatttattggcagatgtccttgttaacagtgtttttcacctgttataaagtataatacatgaatcaattcataaatatgttgtaaaaactataaaacattgcaatatagttacattaattttttaatagataatgttaaaactcagtgcctctatcaaattttcattcatacagtattcttcaaaggaatgtaaattctgtaacttgacaggcatatttacagaaaaattttataatttactttttttttttgagacgaagtcttgcttgtcgcccaggctggagtgcagttctgcctcccaggttcacgccattctcctgcctcagcctcccgagtagctgggactacaggcgcccrccactgtgcctggctaattttttttttttttttgtatttttagtagagacagggtttcaccatgttagccaggatggtctccatctcctgacctcatgatctgcctccctcagcctcccaaagtgctgggattacagacgtgagccaccgcgcccggcctaaatttgtataattttctggtaccagaatctgattacccttttcaaacaacccatatgggtttgttttttaaaaatcatttggtgagtggattagaaattttgataagtatatttcttccaatttggtttattttaaaaatgtttctactgtatttactacaaatgattatagctttttcaaaaataatacagtatctaataatgcttgtacagtgatcttcaaactgggataaatatatctttggattccatacttggaattctttccaaggaataaaggggcattgacagttttaagataagtcagtttcaaaatctgtttctagatgcgccttttaaaaaattaatctgcctttagtccaggtgtcctcctattttccaaaagaaagacatagtctcatgtctttcaaattttagtacagtgcactgcttcacattgtaaaaacctcagcccaccagcaaaagaggacattttgaaatattagagtcagtgttattaagggtgtgaaccattgtaataactggtaataagtcctgttatatactaggttgtttccagttctttggtttcagcaaaatcgaaagggaatcttaagttgtcagtcaataggagcattagcataatttttgaggctagagtactgtatgacttttggcatgtaatgagctggaggcatataaagaactgagtaacattgctataataaaacttttaaaatttcaatctacttgtctattataagcaattcacacctctgtaaaaattaaaaatcggaagagaattagtcctgagttcattctagcaatagaagatatccactgatatatgaactaaaaatcaattactgtttcaaatgggaaagaaaaatactcaaaaggaaaatcttacaaattagtatgggaaattattagcaaataaatatttttcctttaattttttattgtgaaaaaattcaaacatacaaaatacacgagtatgaccagctctcatttatgcatgcctagcttttatttttgttaacatctgtttctccacccagctcaccccactactccataatgataaagataatggattttttatcatttttagttttgattttgcattgggggtggtttactctcttttgtatatgtaggcrtgtgcttttcctaagagctttgcaaataaactttttactgtaactttttcagaattaatatgacatgttaatgattattagatctcatctatccttggggtacatggagtcgttccaagagatacacaagcagatatagtttattgacttaagttaaatgccatttccagggtaaataatatgaacaaacaataatcaaatgcctttacatttaaatgaggaagtatgggggagaaacattctttagtcaatgcaattattcaatacaggcatacctcagagatattgcagatcacctaactaaagtgaagattgcaaaaaagcaagtcataccaattttttcgttaaccaatgcatacggaagttgtgtttatactatagtaagtgtgcagtagtattgcatctaaaaaaaaacagtgtgaataccttaattaaaaaatattttataggtaagaaatgctaaggatcatcggagccttcagtgagttctaatctttttgctggtggaaggtcttgtcttgatgttgatgactactgactgataatggtggtggttgctgaagattgcggtggctgtggcaatttcttaaaataagacracaatgaagttgccacatcaattgactcttacttttatgaaagatttctctgtagcatgcaatgctgtttgacagcattttactcagagtagaacttctttaaaaattggagtcagtcctccaaaactctgccactgctttatgaactaagtttatggaatgttctaactcctttgttgtatttcaatgatcttcagagcatctttaccagaagtagttttcatctcaagaaaccactttcttagttcactcatgagaagcaactcctcatccgttgaagttttatcatgagattgcagcaattcagtcatatcttcaggctctacttttaattctagttctcttgatatttccatcacatgtgtggttacttcctccacttggacccctcagtcatccatgaggattggaatcaacttcatttgaactcctgttaatattgatatttcgaccacctatgatcatgaaagttcttaatgatatttagaatggtgaatcttttccagaagattttcagtttactttgcccagatccattagacaaatcactattattgcagctattgccttatgaactgtgtttcttaaatagtaagacttgaaagttgaagttactccttgatccatgggctgcagaatggatgttgtgttagcaggcatgaaaacaacattatgctccttgtacgtctctrtcagaactcttgggtgactggtgtgttgttagtgaacagtagtattttgaaagaaatattttttttttttctggctggtcatggtggctcacacctgtaatctcagcactttgggaggttgaggtaagaggattgcttgagcccaggagttcaaaccagtctgctcaatatagtgagactcccatctctattaaaaaacaaaatctttttgagccgtaggtttcaacagtgggcttaaaatattcaataaacaaggttgtaaaccgatgtggtcttatctaggcttgttataagcccaggcagggtagatttagcataattcttaaggactctagggtttttggaatgatgaatgagcattggcttcaacttaaggttacaagctgccttagcccctaacaggtcaggctgtcctctgaaaccagacattaacttcttttggctatgaaagtcatagatgtcatctttcaataaaaggctgtttcatctacatttaaaacctgttgttagtgtagtcaccttcatcactgaagttaggtagatcttctgggtaacttgctgcaccttctgcatcagcccttgccattgtttcaccttgtacttttatgttatggagacggcttctttccttaaacctcatgaatcaacctctgctagctgcaaacccttttccgcagcttcctcaattccctcagcctttatagaattgaagagagttagggccttgttctgaattaggccttggcctaagggaaattgtagctagtttcattttttttttatctagaccacacaaattttctccatgttaccggttatgctgttttgttttccatcatttgcgtgttcattgaagttccatttttaatttccttcaagaacttcaagaaatgcaaaggaaacttcatttacaacttggctaactttggtgcaagaggctcaacttttggtctgttttggctttcaacatgcctttcttactaagcttaataatcattctagctttttaaaagtgagagatatacaactcttcctttcacttgaacatttagaggccatagtagggttattaattggcctgttttcaatattgttgtgtctcagggaataggggtccccaaggagagggagagagatgggaatgaacaatcagtgaagcagtcagaacatatacaacatttataggttaagttggccatcttatatggacatggcttgtggtaccccaaaacaagtgtaatagagcaaaaatgactgatcacagatccccataagacatctaataattatcaaaatgtgacacagagacacaaaatgagcacatactgttggaaaaatggtgccagtagacttacttgatgcagggttatcacaaaccttcaatttcttaaaaaatgcactatctgtgaaacacaatgaagtgaagctcaataaaatgaggtgtgcctgtattttcttttgctctatttacataatctgtctagagaatgttgagtacccaaaatgttatactgtataatgctagacattggtaaataccagttgtttcttaaaaacaacgttaagagcaaaacttaattgtgctttaatttagtaagtcacaaaatagaccaattatgtgaccatagtctagagttgaatggtttttatttttgtgtattaaacatgacagcccaatgaagaaaacttgtaagagttttatagggtacagtttaggtcacagaatgaagttcaacataacttgtttattttacattgattgtttaaccagtaattatccatatgacatcccaatgcaaatgctgacatccatttccaaaagagttgtttttttgtgctttttctaaggttacaaaggtttttgtggtttaaatgttgttacatattttacagcattaggatctatggaatattttgacaactgcaacagttcaatgaagttggtaatttcttcttttaattatttttcattgaacagctttggagttacatttctacattttgatttctggtatattataaggaaagaaaaaattatgtcaaaggatactttagagaaaatacatagatagtgattacaatatggctgtaattaaattatccttaatcttgttgaagttttgttagtgcctaattttgatgaaatagtatggtgttccttccagctactgattgtatatatgtgattgcacatctttcttaaaaaagtggatttgtaggttttcacatattgtcagccacactctaatcctcttgtaaagaatgaacctggctttattcaattaaataattctctggtacaggttttcctcccrtaatattttaaagtacaatgttttgggttttttgagggtaaagtaaaagaaaatatgttttaaaaactttagttgtcaaattattttattttaagcctattttagaaattagagatgtattgtttcttttgggtgcatatcaccaattaatacgtttgatttcagatctacaacttactgctttgtaaacttcgccgaggtaaaatgaaaccatttggctacttgaactgatctacattacatagatttttcctattgacatttgcagtagataacatgtcagaaatgaaagtgatgaaacaatacatcttccatattctgaattggcataatgctaaatacaacagaagctaattttttagagactgtgaaatataattttttttagttcaagtatattatagcaagtgagagctattaagaatagagctttctctgcagtagtaaaatgcaaccagaatgtttgcatatactggaattaaaagattagttttgcaacataattcatttttctaactctgatattagtttaaggatttaataaaatataagtagattgttcttaattgaaatattttatatatacttaattcttttcgaagggtgaaactttattttaagtttttttaaatataagattaaataaataacacattttagcaaattatgtgctgtcatgaaagataagggaattcatggtaacttgtatttaaaattctgtaactttgggttgggtaaagatatacttaaaataaagcattccctttgtaattctaatgcattctcaacatatgggtattaaataacatgaaaaaaagtttatataaatgttaaattactttagaactatttcctrgatttaaaaatactaatgcagtatattataatagtagctttgaaattttgatattggcttgaaacttaactgtagtggtacctatattaacgtatttatgtctcttatttttttgcagcaaggagtaaataatgctgaaaaatttgactatgtaagtgcaacatgtcattcagttttcatgccwcattctctatatatttgttttttgattactaatattccctacttttggtttctaggtcatgcagtttttgaataagatggctggtaatgaatatgttggattcagtaatgcaacgtgagtgttttaaatactgttttgttacgtaaaaacacacaactgtatttagaattgatccactctcttttcattggagggaaatgaatgatttctaaattacctgacagaaacacttaaaaatactttaaatagttttgacaaatttcttacaggtaatcatacaatcagaagagaccccaagtttatctcaaattactggtgcttattcagttttatctttgcttgtaatacctgtcttacctctcttctatttctgttccaggctatctggatttttaccccaattttttattttaaaatttgtgagtctatagaaaagttgaaaaaataaatatctggaatcttttacttatattttctaatattttgtcttacttgctttttctcaatctctgtctctttagatagataaaaaatatgtatgtatacctctaaacacaaatatgtaaatatatatgtacatagattttttttccctaaaccatttcaaattaagttgcaggcatcatacttcacccttagataagaaagcacatacagtctaagaataaggacattctcctacataaccacaataccattaacacatgtaagaacgttaacgttaattttaaaatatcatgacattaatcaatatgtaaatgtccccatctcttccccaaatgtcttttacaacttttattattattttttagattcaggaacaaatcaaggttcttacattgtatttattacgatgtctgttttgtctctttacttagaacagtccccgtgcccttgctttcacaaattttattaaatggcttttatttttaaagagtgcaggctgcttgttttatagaccaggggttgctgactttttctttgaaggaccagacagtaaatattttaagcttgtgtaccatacggtctgtgttgtaacttctcagttctgcygtttagtagaaaacagccatagacaatatgagggtgtgttataaaaaactttataaaaacaggcagcaggccgtatagtggatgtttcccattttgtatttgtctggttccttgtcattagaaacactataatgttaaacgttatcgtaatattattatgttaaacagttttagcatgtatactactattttattcttattttgcacttcctgcttcgcatttcaggggtaaacattttcaggttgcatggcttcccaacattaattcatcagcttaagtatcttttccaggaagtattccatgaatctcaacttgcctcttttctgtgctcttctgttaccatattttatcaaacttattacatgtctctctttgccccataaccaccattagactctgccctccttaagacctagatggaatgttgtgtcttccagttcatttctgtatccctgttatctggcagataataggcacttgagatagtgttgaagaactatgtgtcagtcactgtgataactgctgactagttagtcatttatctaaactatgttgatgttttttttaaaagtacggcaaattgataagaatttgaaatgttaaaatgtgcaattagaaggggctgtccacctcagtgatataaagaacattaaccacagttcctctaatatcagcagcccttttagacttgtagggcaattctcaaatataccgcaaattaaatctgtctaaatcaaaactcattctctttctttccaaactgctctttgctctagagatagatccctgtatcagttaatattattatcctctcaggctatgttagaaattcaggctttgtatcagtctttactctgcctctcctttttctcatcaggttggaagattatccaaytacttgcatatttgwtcatacctctccttccattcctatcacagctgcctaaattcaggcttttgtagctctcattacagtattctcttaatagatcagtcatcacttctttttcccctttttcaaactgatgtcagagttatctttccaaaatgcagatctgattaggtaacttctttgtaagccctcaggcttttgttttgtgggtagtcaggagctattaattatttggcatctattggttttgataatttggtcccagtctcctttgtttgtttgatgttttcccactcctctccatgtgccattccccagttacatcagaatatttgccattcttcagtggagccctgtctatatacttttctaacccgttcatgatgcatggaatttgccagtgcctaggcctcaccctgaaatctattagtccattgagtcctgcaagatccattttgtgtttcccactctcagtgaaagttccatgattatgtcaagttccctgattatgtcaattaaaatggactcttattgtacttttgggtagccagaggattctgcagtttttcagtgtattttaatggtagaagatttgagaattttaaaattagcatttttgtttacaaaatatgaagactagaaaggacctgaattcrtttcagtcattttatagccaagaaaatgaagattgaaagaattaccacttaaatgacttgtccaaagtcacacaaatagcctattgacagaattgattggaactctgtagtcctgaatcttagttcagtgttctttatgctgtacattgctatgcaaatgaaattatgaacaatcacacttttaaagaaagtacatagagcaaatgtttttttttcttcttccaggtttcagtctgaaagagaaagtggagatcgaaattttgcaataggatattacttaaaagaaaagaaggtttttaaatttttgtttctatttcaaattattctttcatttaataaaatacatgaagatgtatgctaagaattcaacaatagcctttaagcaactacctattactatttaaggtgcagaagtttttgcagagtgctcgtgagtcagtgttatcaaattgttaatgttattgttaatttgatttgtatctggcagcatttaaatatttgactcatattatttattaatacaaattttgtttgaggtttagtctattttttcaaaagcatgatgcctgattactgttaactactcttgatttttttaagtggctggtctagtaacttgatttataaatcatgaatcattttatcattgtcagttaaactagtatctagaaacttacatgatgtgataaaattttgcttttttatttcatgtttatactcttttagaagttacatgctattttattaattaaaatgaaacacttgtgtacatttgaaatttttcatatatttctctacttatgtgcattcctgtgtgcctgaatttttaattgcctttctggtttttttagtgttttccagaaggcacagacatggttggtatattagacttctacttccaggtaatctaattatgtaaatcgtatatataaatggatgtgtcggctgggcacggtggctcacgcctgtaatcccagcactttgggaggccagggcaggtggatcatgaggtcaagagatagaggtcatcctggccaacatggtgaaaccccatctctactaaaaatacaaaaattattcgggtgtggtagtgtgtgcctgtagtyccagttacttgtgaggctgaggcaggagaatcccttgaacctggaaggccgaggttgcagtgagccgagatcacgccactgcattccagcctggcgacacagtgagactccgtctcaaaataaataaatggatgtgtcacattatgcaaaatatagatgtctcagaaatcttggttctaggccatgagaaaatacattttccattgactttcaaaaatgtcttcataaaaggcagtctcatgtccatgcatgttgcctaaaaattcatgcctcaaaatgtaatggggacaattttttctgtaaacatatttaagaattgtcaaaaataatgaacactcccagaaattggcactcttaattataaactgggctctaaatttttcgtagcttttacattttgtttgggaaaagctttattttttatttttttattttttaaatcagagggctcttattcagcatttaaaagtgtcagtgtctcagctgacttggtatcttgtaatttctttgttactactctatcctggcttaactggtgctagttcatttctgcagtgtcatatgtcgggctttcttgtaagttagagtagctctcaatattgagggggtggggttgagcgagagggaccgtgttacgcacaatgggctatggtatagaactcaatttagaatagccttcctggagatctcttctttcacccacattttcagctcaatttattcttacagatttaacacagttggtgccactgatggggctgtaatgtgaagccacataggaggctacattattgttaatttctagttcaccttacatttgcctgtctttactattaaaggttccttaattttaacctttcagtaatcttagagaatatataagggaggttgataatgagttagattttgatagatgtccaggttgcagcttttcatcggcccaatgtgaaaaaccgtaaattgggaatccagaccatcaatataaaatttaaggtctagcctggccacttattagccatgtgacctaattttagttactgatccctagtttccttatgtgtagtatatgcgtcacctgccttgccatattatgtggaagataacatgagatgatatgtgaaattcctttgaaactagccttttttttccccctggtctgtatgaattttttccgtaagtttcttttcctttggaatacatatttaaatttggctgttatagaatctactgtaatgtgacatttctatacttcattgcaaaaatcaagaaacagccatagaagtggtactgacttttttggagaagggctgcatcaaattgaacggccattgagattagcaggagagtacccgagttggcatttggcaaattaagaatgtgctgccttatgacaaacaaaattccaattaatgttaagtataaattaggaaatgatcattggaattcagaaagccttgcatgattaagtcgaccttatcacaaatctttgctatctggggcagtattgcaagtcgattctgtcgtttttgagaaatagggaagagattttttatataaataggcaatgtagtcaaagttaaacacacaatgttctaattcactgtacttagttttcctccttgctatttccaaacccctttgtgcctcttgtagatcttggagtatggctgaggaaaatttataagttgaactcattcttctcctatccactttattttttgaccccgtctcatcccaattttgcttactattagctaaaaataaaatgtggaaaaatttattttcattttatgggtaaatttgggtttggtacggtgaactattttcattattttgattgtatttaaatgcaaaaattttatcctagagggtattcttagcacccatagtaaatatcaaataaatattaataaatggtctaaaggataacattttggtttaggcttacagagcatctgagacagatctgctttatatttttcttcccctttttcctttgcctgttaccatatagatggggatgccgaactttgttatgggtgaaatgtcaggcactgtagcatttttttctaaaatggtgatttctcatgtagacactatcataatcttcatgtatggtgctttatcttaaaaatatttcatggctctttttttttctgttgagttaaaagtaattatgcttgtgtattccacagaaagtattaatatttaagcaaatttgaatatcacatgggataataacaaatcttagtgtttagaggctggcacttcctagtctagttctgccattaaaagactgagtatctttggccaaatcagggtaaatcttaaaagtgggtaggacttcggtcaactaaaatcttcagaatgtcctcaagtttatattaaagtaatctctttggaagaaatatttcagatctgtatgaaataccaaataaaatagattatcttaaaagtgaacagtaatattaaaagtagtatgagaattctgctttttctttgtgttagctgtgctccattgaagtgacttgtgaatcagccagtgtgatggctgcgacactggctaatggtggtttctgcccaattactggtgaaagagtactgagccctgaagcagttcgaaatacattgagtttgatgcattcctgtggcatgtatgacttctcagggcagtttgctttccatgtaagtaattgtttaatcttattttctctggcaagaaactagtctgaactggttcttttaaaaatgcagtttgaactttgcttctaaagctgtatattaatttttgagagagaggcttgttttcaaggttaatttgttacaagattagtaaggaatagagataaggtctaccagatgttcttaagaacttggaagtttgatttatagaacctcatcccttctgcttttaaggcaatccagtgtacaaggttagtacagtctttctttactttttgtttttaatgtttagcattatgattatgtatcttaagaattctctaagttcagaaagattgcaaagatgtgacgtttcacatctttggttacggccatagctgttttaaggactaaaagtgtattaaagttaaaacttaacaaaaatgtactgctttaagctctgttgtgcatttgccacttgtaaagtatatagactttttttatttcattctgctcatgtcaagtcataatgcccttctaaaagctttttttattttggaaattttcaaacatgtaaaacgagagagagagagagatacatttaatgttatccatcactcagcttcattaattatgaatacattactaatcttgtttcatctrtatgtgcatctgtttcccctatccttgtcatatttcagtatgtaattctaaataaggatccttaacaaaacataacaataatacagtttttacatataaaaattaaatattacatatcaaaactttaatatcattattaatatcaatattaaattgaatatcaaaatatttagttagtgtttagatttcctggattatcttgtaaattattatttctttttttttttttttgagacggagtttcactttgttgcccagactggagtgcagtggcacgatcttggctcactgcaacctctgcctcctgagttccagcgattctcctgcctcagcctcccgagtagctgggattacaggcgcctgccactgcacctggctaatttttgtatttttagtagagatggggttttgccatgttggccaggctgttctcgaactcctgacctcaaataatgcacctgcctcagcctcccaaattgctgggattacaggtgtgagccattgcacctggcctattatattattttatagtttgtttgacttaggatacagatgaggtgcatacattatgattgggttttgtctcctttttttttttttttaaatctattggtcttcttttgacctgtctctctttttttcttgttatttttggttggaaaaactgggtaatttagtctatacagttttccactgtctctacattgctgattacctctgttccattgtcccttgtatttcctataaatttgtagatccaattcaggtgtgttttttttttttttttttttttttggtctgcttgttttgtttagttttgtgtaaaagtactttattggtatacttcttttatttttgtttgtttatttatttatttattttgagacagagtctcactgtgtcgcccaggctggagtgcagtggcgtgatctcggctcactgcaacctccatcgcctgggttctagcaattctcctatccagaggtactgactgactgaatgttagtaagcaattaatgaacactgctctaatgacattaayttttttttttatcatttgtcaagttttgctaatgtaacttaaattttttgaggaggagtaatttaaattaccattttagaaaatcttttaagaatatataactttttattgttttctagttgtaaaatatttttaaaaaataatttgttatatttaaaaacaatacgtttatcttagaacaattagaaaatatagtcaggaagaataaaagcatccatagcctcacaatttagatgtaactgctataattccttagaatgtatctttaaacaatttttctatattcatatctatcccaaactgtttcataatttttttttttttgagatggagtcttgcttcgtcacccaggctggagtgcagtggtgcgatcttggctcactgcaacctctgcctcccaggttcaagcgattctcctgccgcagcctcccgagtagctgggattacaggtgcctgccaccacacgcggctaagttttgtattttttgtggagacggagttttgccatgttgcccagggtggtcttgaactcctgacctcaggtgatctgcccacctcggcctcccagagtgctgggattacaggcatgagccaccgcacccggccttataactttatttataaacatgttgataaaaatttatctacaatatttttaatgttgaaattctatggtatgtatatatatatattttttttttcgagagggagtctcactctgttgcccaggctggagtgcagtggcatgatctcagctcattgcaatctctgcctcccgggttcacctttctcctgcctcagcctcccgagtagttgggactacaggcgtgcactttgggaggctgaggcgggcggatcacaaggtcaggagataatttttaatttttaaaccaatttcccaattgtgttttttttttttttgaaactggatcttgctctgtcatccaggctggagtgcagtggtgcgatcatggctcactgtagccttgacctcctgaggtcatgtaatcctcccacatcatcctccagagtagctgtgactactggtgtgcacttccatgtctcactgttttttgtagagacgagatctccctgtgttacccagcctagcctccaactcctgggctcaagtgatctgcttgccttggcctcccaaagtgctgagattacaggagtgagccatggtgcccagccccagtttccctattgttgaacataacatttcttattttaaaatgtttacctgaatactcttttactgaattatttttaggttggtcttcctgcaaaatctggagttgctgggggcattcttttagttgtccccaaygtyatgggyatgatgtgctggtctcctcctctkgataagatgggcaacagtgttaagggaattcacttttgtcacgtaagcatattttcttaatgtaaataatggtgttacaagttgagccatccaatgattcttttttttaacccattttccatagttcattaactcttggccctccgcctatagtgtgccagttactagggagccgtggaaatactcccagaggagcttcaagttgtctctgtcagacagctcccatttaattattcccacagattatatttgttagatgctaatattttaattttcatggttataattagtatcaattttcaaaagctcaacaaaaggtattaaacttggagaagtaatttaaaagccagtatatcttaagaattattttggtttattatatctttaatctgcatggttaaatatctttatccattgactacctttaaacatttttttgaggaaataagcactgaaaattaaaaaaagattaaaccatttttaaactgttactgctcttgatagttctgtattttgttgttacccagttcctgctaatgtttgagcttctagttttagttacattgattacttgcttgagttcatattaagtaccatactcaattaaaattgttttattttccagtcttttatattttacaaaaactagagtatgaccttggagtgcatataaaatatagtagattgtaaccagagtacttatttatattttaatgtggctttacacttatttgatagaagaattctttcatggggccggttataaaccctattttgtagaagatgaaagatgatttgattggctgagccctaggatcatgttagtaagcagtgttcttaaaacttatatccatatcttactctgattttagttctcttcttgatgcattatactactttattagcatgtagtgatgatttctaggctggacgatataagcagagtttgttaaaatatggatatatataaccaatgaatagccaatttcttatacctgctctgtataactgtttacaggatcttgtttctctgtgtaatttccataactatgataatttgagacactttgcaaaaamacttgatcctcgaagagaaggtggtgatcaaagggtaagcaaaattcttatttagataagtatataaaatttttaagaagagaaaaagtgagatttgcctgtataaataaaatcttagtttgttagtggcctcgggtctttgctaatcataaatgagtgtaaacaaattgttgacatataaatccgggatcaccagtattaaatacttaaagattgtttaatagatagttaatagatacagatatttaaatattgctgttttgttatttaaattgaaactagttagcctagtgtcagggatttccccttccattttctgctattttaagcaagatttttagaattgattctgttaaaaaaagaacaaaacaaaacattggaatgtgctgcatgctataaagaaagcatcgttttaatatttgttcgtcctaaattgaagtttaacttcttgcatactgtgtagatggatatgtaaatggaaaaggattatcatattagtgagagaccgtatgaagcctcaaaagttttataagtcactgtagatgaaatatttttttccaccgtgtttaatgcaatattcctaataatcttacggtcctatttgtttgttacgagtttatttggcttcatactattgtacacatatattcctttttttagaagtagtattaagagtcaggacttaacttttttggtctatatagtttttcactgtaccaaggggcttgtgctgagaattttgattcagtttctttgcgtaccatattgaaaatgtttgtagtaaaattacctaattagacctcaagataatatgaagaacttctaagtagaaaatatttttaatacatactaagtacattttctgtagtgctaaactaaatttttgttagtttttatcaaattaatttctgttactatgtaagaattatgcaaaaccaacagaatagaaacttccatgggagtcgacctgagtaacatgaagcaaaatgtcagaggtggtggtttaaaatgttaacattttaataatgctcattgaaaaataccattttatagcttggacctttcttcactcaagtgcactaataaattatgtatgttgcttgaacaactagcattcctttggaccattggactatgaaagtctccaacaagaacttgctttaaaagagacagtatggaaaaaagtgtcacctgagtcaaatgaggacatctctacaactgtagtatatagaatggaaagtctgggagagaaaagctaaagaaatgggttctagtttcagaatgtttcttcatttaatctttcaaacatctttagcttttttttgcaagttataaatatttatttgaggtattttttgttctcaatcttgggtgctggagccataaagcttttttttccttttaatctttgtataaaggcagtagattaagaagtgcatttgttggtctttaaaaagtatttacaagtacataaatttgctttatttttaaaaatacaaaaaggaaaaatttaaattttttttgatgtaattaaaatgttaactatgtggtcagataatcccattttacaatagtaacagaaaattgtaattcttagttctaaaattcacaaattaaactcataagttttgttgcattttgttttttcttttccatttttaaaactaatgtgatgtctttagtggcaatagaaggtacttctatgctaaatacaaaactaaaaaggcaaaataatgaaccccaaattattttatttaaaatagcagtggattataaaattagcttgtgtttacatttatgccatttttggtgatagattggctttacattttaaaaaatttatttaaaaatttatcaaatgctttaaaatatgactcctactttttttattttgcaactcctctgttctgtcagagttgttatatacaggagtgtcttatgttactaaaacattccagccaaagaatttcagatgtgagataatgatgtttcatcaataaaaagctataatggttagttactcagaaggagaaacagtgagtgtcttcaagtgaattgttcacctaaacaattttattttcatattatccacataactttttctatgttatatttaaatatgaatggcaaattttggtttttagcttttacattttattatcttaattttataaatgctaatatttcttttgtgataagttatagcatctcataaagtttgttctatttgaagttttttagagtacttgagaaatgaatttagtctgcaggtagtaagtatgctactaaaatacgttagatctaaatccttttatttggtataaaaatgcaatattgagaatcaaaacttgtttttaagagaactatagattctacacaacctgatttcaagtaattattcatagtatttatagttgtcttggcaaagtgattgtaaaattctgtaggacctattcacacttcttccttcttccatatacttctctggttttccccatagttcccctataatttcaagtttgttgaaacctgttaattttagtgggggattagaagaaaaacttggtggtttcttagcatgatggtgtatgtatgtggtaatggaaagtctgtaaaagtaaatatagtgtagcaaaaaagatttcactgagtattttagatactagtgcaaataaagatagaaaatcttgatcataatgtcttaagtttgggaactgtgatattaagaaaagaaattcccttctagaggtgctggccaaaaagccttttgggctaacttaagtattaaatttatatatttaaataattatattttaagttgtagaggattttcccaaggattttatgcttacttgaatgttctttgaatgttcagatgcatatcctaactggatgcttctcaaggccttactgcatatttgtgttgcatatttatgttagttgcaccagggccatttgtagtttgggcaaccgaatgccttaattggaaaaaaggcattgtggtttcccctatgatctaaattgttacattttaccatttcattccgaagttggttttactttattaaatgaagatttagttttcatatcgtatacatagctgtatagatttcaaaattaggttgttaatttgtgtcacttactatttttgtgttggtaatgctttaaatgcatacttaaaaatgaagtactgttatctaagctactgtgtttagaaaatgttaagaatgagcagaaatttttatagaaaagtataaacggargaagagataagatactgcgaataggccctcaaacttaaaaaagaaaaaactttgccagttttaaggacatattttgattctttcagtattcttaacacctttttaaacaaagttcttgatagtacccactattattgggtttgttttatgccattattgattcttgatattcaagcatttacaatgtagcatatttgattttcttttttctttctttttttggcatcattaacatttcatttgaaatgcatattgttcttgaagtactttgtttttagcataaatgttgtgcattttatcttagtgtttggatgaaaacatttgtgttgtttagctttcatttgctttgtatatttaataatgtacctttattttccagtatgcctacattttgtattgcacaataaatttattttaagctgattttattgttttttttgttttgttttgttttgtttttataaaagcaacttcaacattttaagtacaaatacagttgggattttaacttagaaaaaattattctttatgaagatactgttaaagtgtttgctattctgaagctgcctcaaagtaaactagaaatattcaaaagggctttatttgattttttaaaatgcaatatagcattagtggtttttttgggaggaggacttttcttattggttgtactagaagtatttgaataaaaacttttctctcaatttttttggtggtttttccatttggtaactttaaaaaaagtgcaaccctatttgtaggttatttctgctttctgaggaggaatattgttgttattcactatgtaactctcattttatctgttgttgcctaaataataggaaaaacattgctaaaccaaatgaagagtatcatcatattgctttagaataaaactgttaatctcagtagaatttatattaaacagaatgacagtgatacagaaattcaccttaactggtttctgaggggattacattttcagaaggaattttgtatatttccacagcatgatccaaattatagtacaaattatagaggctccatgtattgtaggtcaaatatagtactttacatttttatgtttaattaaatctgccattcatattctggagattcctgaatatattgtagaagttttaaaactatttgaaaggggaaatactgttgtttacatgaatttgtattaatctgtgggatttttaaatgaagttcttttagaattagttaataaggagttccagtataatgatatattcaatatatgtaacagtttatgattacttgcttttaaagatttttttaaaaaattyatttgaagtaaagagagaggagacttaaaatacctggtgatcttgatctgacagtgtatatttaataggcatatatttatgtggaaagaactgctgaaatatactgatatgtcagcctatatcctgataatttatatataatgtgtgggttgcatatgtttgtgcatatgtatatacgtttgtgcatacatatatatgatttccttatctatgtaccttaatctacccattcatattctgaaaatgatgagcagttcttttcacattgtgtactatgtataaattattcattgatctattcctgttccaagctttgacacaaaagaacccctaaaatttttgctgccctagaattggtaaagtataacatactttacttcttcaatttgactttaaagatttgtggtttctgttaccattcccattcactaccaggactgccagggtaagagagtaastaacaatattgggggaactctggaaaagtgaaaccaagaatrttagatttcatgtggaatttaaagcactttccaaaatgtattataaggaaggattgtattttttaaattgtttttgacttaaaagaagtaatgcacttatattgagcagtttatggaacagttttatttagttactgtggtacagtttttagttttaagaatctgttttactattcatctgtaaaaagtttggtttttctcctacatggccttgaaaatgctagaaagcattttttaaaggtatacgatcagaatacttaacgtgtgatttcttctcaattacttctctaccattttatatttaatgttgtatttgcattgtgtaataaaaccaaaaccagatgttggagatgtagcataaatggaaatttgttaccatgcatgatggccttatgctcagattttcatttagacttactgagaatggactttaccttactcggtcttttctctgtcatgtagttcaagggcaaaattatacataaacatacactcaagtatatccaagttcaactatttttcttttatttcaaattgtaacaaagttaaaaacctttgtttgttaacattgcttagaaatggaaggaatttaattagaaatggaaggaatttaattgggttgggggaagttcttttattttataccccaacctccagctagtagtttattaatctgaataccataaaatgcacatgactttgagaaatttagaaaactactctaagaggatctgaggcaatatttatccaacatgaaacagcgggcaaaatgtgatgtttcgtagagttcttaactttttaaatagtaatagaaaaggtacttatttttaaaatagtatgttaagtagactgattataaatgcttatttaacaaagtgattctgttactatggtcttaaaatgttttctattttatgaacataggagaggaagagaatttaagttgactttgtttgccatttctattttgtagattgtagatctactttagtaatttttgtaagttgtagctaatagagattttttaaatatgccatgtatagaaaacctgttttcataaaaaactttataatggcttcctgatccattaacccttaaccaaaatgaataggatactaattagcacttggattgcattgcttttttggcggaatctgtgggtttttttttttttttttgtaaatttcattcaccagtaaattacagaatacttattattgaaaaccatcatgtattgctttaaaacaaaagttataatcttgccctcaaaaggcaagmgttagaaacaggtgagctggtgccaactgcttctgtcggttaatcttgtaacatttttactatacatttaactctaaatctcatttactaattatggaatttttttaaagaaaaattatataccrcatctcaatggcaaagaataattcattgtatttatttttaagccatatttcaatatctgaggatatgatttttctgtacatagtatgattaaaaataatggtattttttcattaggtatttaccttgctgaaacactttcaggccttaaaaccacagataattaaaattatctatttggaaggcttagcttttgaaagaaaaaattcttacccaaagtagtttttaaatttctattttcatattatgtttctggtgatttatgtttatataatgaaaatctcctctgcacagcaattatatttggaatcctgagctataattaaatttatattctgtaaaacagccgaaggctttcttttgtttttaaaacatagtccaacctttctagaattttgatgtacttttatttaccataatcttatatattttttagaatcacagatttgaatttgaaagtaatcttaaatgttacctggtacagactcccaccccactcagcccccttttccaggtttcctagcactttgctttttctattagcatatttagatttttttctcttgagggggttggtctgttttgtgttttgttaggatggactttctgtttgtagatgtttctgtttgtggtttagttttaatgagagaagcataattggcagtagttaatgtgactataagttatttggcagatggtaccatcagcatttattaaaactaattgtatttttctagtaagcagtcttatgtcccagttgttaaaaattagtaaagttagaagtaaatgttaaagttacacagtagttctaaaaataaaacattaccctgcaatctttgaaagaaaactgtagcagaaatgtaaatctaaaaataaatgttacatcactggctttttaaaataaattcctttgaggttagattaaatatataagtaaaacgattttaaataaatagaagactagtcaagttctaaacaaatggtttcttaagaaaaatttgttttctttgcatgttagctcttggaaaacatgcaaaatatctagctacttcccttgtttattttagacatttggatctgtgagtggcccccaagtttcctaatttgtctgtttatttactctgtctatagtacatgttgtcttcagtatcaatctccatttcatagttctggagttttaatatttatgaaggactgtgtgtattgagttcttgaaatatgttaasttttgaaaggctttgttgacttacaaaatgttaaaacttaaatattgttgctctcaaaatattatagtattggtttcttaattctgaaaatttaaactgcctgagtagctcttctccctacaagtttcagtataaactcattcaatataaagtctgcttgcttttatattatgcattccaaaataaaaatgatgaaatattagtatcagttacacaaatgtaactactcacatttgaaccattttattgtaaaattcaactttcaattatgataatcagtctcttgctgaactttttagatctagatgagaattataaatttttgttattttatatgtgttatatgtgtttatatatgttttatattgtgttatttcacaaatcatcacaaaagggcaatttcaaagattcttttgagaggacagcttaaagcttaatccttaaggcttgactttcttctattaaatgagattgatacctaaaatcatggtataaattattaattgaattccacccaagttctgttgttttgttctttctcacagtcattccaaattaaagattttagttgaaaaactcagaatatattatctaaatttcaaatrttctattttttattgtttcrtrttataatttattttgggccaaaatgaggtaatttaaaaaattatatcaaagttactcaggaaatgggttttcagttccgtatctttatatatgttcacttccaaatcttttgatgttgacatttgccattgtagtttaattttctttaaaaagttcgaaagaaaaccacacatgaaatgtaaaagtccaaatttctcttcttcagtataatatagcttattctttatttattattttacttagatccttgaagtatatgcatcattgatccaggtctatgcacaagatttataatgtaaataaagaatgaactaaataatactgtttgagatgaatatttgaattgagatgaataaacgttgcatctaatgcacaatgaaacttcattgacatctgatgaaattacagtacaagtgattttgttaacattctatggtgactaatactattaatcctttttaatcataccaataaaatatttctgccttaatgtctctttttactggactatgaagaaacaattctgctgttaaaggataaccaaaaaaataacttccacctatctgaatgcccttattctggcaaattagcagttttattgtagacgtacccactttaagttgctctgcttctcttctagaattgcttttgtaataagtgtaaatttgtagtcagataactcattgcttttatgaagttgctttcccacttgtgtgaccttaagaaagtggctgaagtccaggattcttctggcttcctggtttccatttcaatattttcaatccctgttttacttagttagcaaacttttttttttttttaatgccttctaaataggaattttgttctcctcatgttgttttcttctcttcatttctggtacccaaccaatatccaagattagatccctctatataaatgaaaatgtataacctttaaaattattttcttttggtctttttttctaccaagtaagaactaaaaaagattaccatccccctcagcatttcactagtttttgttcaaacagcacacaaacagaattatttcaagatatttagctaattaaatttgattgtgcaattcagatctatataaattaaccttagcattattcctgtgctttattattcactgataggttcttattcaactaatgtttatttcttgcctaatatgtgccagaaaccgtgaagtgtttaggatatgcagtgagtggttaatgagacaagtatgatccaacttgtgtttgcaattaagcagggatacaggtactgaataaatactgaaaataattaaaatggtaataagtgatttgttaatactgatgcatgtagatctaattcattttaaatgttacaaaataagttacaaaatggtatatgccatatgatgctatttttgtacatctataataaactttatgagacacaaatatgcaatgtagttactaataaaactataagaacawgaacaccaatctttagataaagcttactgccaggagggaatggaatggatgcagagagcatggttagctgtatctttaatgtttcatttctttaaaaaatatttcagcaaatataatgataatgatagaaaagtaaaaaaatgctaggagagggtacaataagaagaccttgttttgtctgggtggttaaatatggttggttttcactggaaggtaatacagtgtgtaagttttgaaggagtcagaggaaatatggaatagtgttaataggctagtctgacttgaaggccccagaacaggaaggagtttagcacatttgagaaggggaaagaaggcaaatgcgctgaagaagagtgaggtgaggtggatggagattggctgtggatgactcctaagagatggggccatattatgtagagtgggccttctcatatttcgatgtacatcagaattgttagagtgtcttaattttaaaatacagctagcttcctggggcccattcctacagttggattcaaaaatctaaatgtttaatgtgcaccccaggtgcttctgctgtaggttgtcctcaggacacagtttgggagacatttctgaaaggtcttatatgctatattaagaattttggactttattcagagtttagtgtgaaactttgaagacttttttttttttttttttttttttttttttgagacggagtcttgctctgtctcccaggctggagtgcagtggagtgatcttggctcactgcaagctccgcctcccgggttcacaccattctcctgcctcagcctcccgagtagctgggattacaggggcctgcctccacgcctggctaattttttgtattttttagtagagacggggtttcaccatgttagccaagatggtctcgatctcctgacctcgtgatccgcccgcctcggtctcccaaaatgctgggattacaggcgtgagccaccacacccggctgaaactttgaagactttaaaaaaggggagagaatgatttggtttttaaatactgctctgcggagaatggattaaagagagagaaagttgaagttttggactcgagatgtgttggtggcttggactagaggtgagagaaataggtaaataagagatgtgtttaagaaataggattggcagcacttggtgatcgtttttggtgggtgaaaaggaatgcgatatcaagctgactaccaggtttwtagtatgagcaayagggccaaagctgctgcattaactaagatggagaacactggaaaagcaaaccttgggagtatgggaagaaattagtttaactttggctattgtgacaatgaaggatctgtttgattgtggatatcaggaggttgattgacagtgctttaaacatatgggggttatttttctaatataacagaaagtctcagggactatcagggaaaccaaccagggctagtgccattagtaaggtaaacttctgttacacaagccttaagtgtgttgatcttagaaatcacgcctatcaacttagagttgcaaggtggctgtttcatctttagcctcacctgtatggccaaagtgggagaaaaagaaaagagtgatatctaaatctaaagaaagaagctttactggaaactcacctgacgctcattgaccagactaactgcaagggaatctgggaaagtgtttttaattggacacaatactacctttaacaaatagaggttctgttagtatggaaggggtgggtagtggataatggttagacaactatcagtatgtagaagctagctaatgtttgagatatttgtgagatatctaagtagtgatgttgagtaagcagtcagatttaggcctaaaacttagagcagtgtaagttggagctataattttgtgagtggtcagtatgaagagtagtatttgaagctggggtggtgtgtgagattgcttaaggtgatagtataaagtgataaggaaagtgtatcaaagacagaaccctaagaaaccatcattttaaaggtaagatagagtaggagaggcttccactagggaaaggtggccagagaagagaaaatccagcatagtgcaatatcagcagtcaaggaaagagtattttaaggagtttggagcattgaactgtatgaaagcatagataatttagtaagatgagggttttatatttacatgatgtcctttctaaattttttttagatagaacaattgctttattttttagtgtcttaaaatatgcttttctccagcaattttctgtattatatgttggaggagcctgctatgtaatttgaataataaagtggctatgaaagtgctttgaaaagttacagcattagagaaacatactgttattacacctcttctgtgagtatgctccataaagcacacatgttgaacgtttcacaatagaaatgtgaaataaacattgaagaatatagggagttaagtaaggctctggagaccagtgaaaatgagggatttcttttctaacattaaagcaattagtaaagattgtgttagtattgtgggttggaataactatagaaaactcaagtccatgtgcctggcttygttatagtagcaggatttgaggcatgctaagagaaataggaccttaaactctgaattgaaaccataattcktcctgtatgaatgctaaaaccgtgttgtttcacagcaggaagagaacctcatctattttcagggaccttgtttgtatttatttatttttaatttacacaaaayggtgtctttgtaagaatagtttgattccaatggcctggatttttttttttttgtttaatatgtgtatttggtgatgaatgtcttctcttcctgtcttaaattcgcttttaagttctttgacttttgggttttatgtacttgttttttaaatatagcactttatcattccagaaatgtggaaccttgtcctctatcctaacacactaatgtaatattcactaatgttcatgaacttttacaaaaacttgtttgtataatagtgggagaagaccagaaagatagtgaatgagaaactttgatagttgtctgtgcaatacagatatgcttaaggtctgcagttttgttctttggaggagtagctgtctttgtctttgctcattgctatttttcttctcttctgctttctggcttattgattaggagtgctgtttttcagaccacacaaagatatattgttagctacttttataattggatatataaagagggatgcttatgacctcattggtatctttttagaccattcattggtgtttactggaataatatgccactgagaaaagaagttatttatttgctgccagtagcgtaacagtcatatttgcttttattcacattcacccaactcacatttcatttttaaagttttaaatgcaaagaataaaggtaataactttttctatttgtcrtttgtgatattatcaaattgaattatttcttttgttcttttattttcccttcatttaaaaaacacctttgggtagcacctcaatataaaattaatatctctgatttttctataaattgtttctttgttgctattttctgatttcctatcacaacatatttctgtcttggtattgtattattgaggaagtcccaggttttgttaggaaattgcttgacccagtagatagttagtagttgcaagcactggccctggcatcttccagactgggtttgagcccttgttcttccacttaccagctctgataccttgctgaagttgtttaaatgtttcctgtcctttaataacagaaataacatttggagcacttagctgagtcgagagagtaggtgcttcatattaactattttgttgtaagtaatatataatctttaattttttgtcttcataggttgtcagattttttgacatgattatgactttttagtttacaaatgagtgaaattatttcagattaaactggtcattgaaaaattttgaggctaggcatggtggctcacacatgtaatcccagcactttgggagggtgtcaggaggattgcttgagcccagtagtttgagaccagcctgggcaacatagtgagaccccgtctctacaaaaaaataacaaagaaatcatccaggtttggtggcacatgcttgtggtcccagctgttcaggaggctgagttgggaggatcagttgagcttgggaggtcaaggctgcagtgagccatgattgcagcacggcactccagtctaggcaacagagcgagagcctgtctcaaaaaaaaaaaagaaaaaaaaattgaaaattgtatgcttttaagggagtttattacttagcaaagtcaagaacagaatgcagttcttggaggtaccattttgaggttgtatttttaaagtgaaatttctgtaaaacagagcttctttcctttatagtaaaatttgctatttgatttattcctctctattgaaattactatatgagaacctcctgcatttgtgtaagtttggaaatatgggcatgaatttattgaattgctattcctataaaagattttttccccaaccctccgaatcatatcagtttggattagttttgtctatatatagtatattaataactgtgtctcagtaaatctttggaaagcttaggaatatgtggcctcatactcagactgtctaattacaaaagtagtataatttttttttacacatccttaaaaatattaaataagctcagtagtaaaggaaagaggaaatatcttcaatcacatacacaatacacaggtttacttttacccttgggcaaggtgattaatttacatatgatggcaacttaaaatttttctttagccacagtataataggtagtatgcctcaatttgaccttaagaaaatataaaagcaggctgaaagcttattttcatttaaagactataatctgccaagttggagtgaagcctttaaaacaaaattggatctggagtcatgatggtttatttaacagttgaagaaaagtatctattccatgacaacagatactgtactgagctggaaatgagagcagcttatctcaaactagaggtggtagaaacagaaggatgttttttcagttacctgcttttttttttcattatagcagttccaaacaggctgaattcatgtttatatgaagacagaaactaaagatgaaaaacagaggaaattttggtttggcagttggtaatggagttagaaattaaatagttgaagtaaagtgtaaaaccagtgaaccaatttttcctccgtctctccctccctccatcttctccctttcttccttttctcccctcccgctttggtcccatctaggcttccttccaatattgagtaaagaacttttatggattagagctaaattgatatttaatccgttggtttccttctgtgctttggataacaatctgagatctattaaggactcacatcatcatggtctagttgtacagaattgggaatccagatacctgagttctactcaagctccatcactaattcatatgctgtgtgaccttgagccagggtccttaatctcagtggtagtaataaataaaatatatctatcaacatattttataaccagcctgtcagggatttttaaaaacaactataactgtttaaaatgttgaatgttttagggtcatccactatataaatacagagtaatgtgagtatataattctaataattgctacttactcataagtacagaattattagggcatttacagaagtcacacaactcaacctttaaacaagctcaaactgagtaggataatgataggattaaagacttaggaatgccatgttttagatgtgtaaaactgatacactccccacctgcttctagctgttttggaaaaaagtgagatttgctatgccaagcatgccagtgttaagtgaactcatgtgaactgtaacattttttgtcccactgttgtcatgactttgtacaaataaactaagataagattgtctggttcgggcagattctgataaagagacttgataagaaaaatgcagtagtgctggaaaatctacaagatgaaggggaaactgttaacagttaatttataaattttaatggctctctgcccaggtgcagtgtctctttgccatggggaggtatacattaaacatcagagcccttaatttaatagctattattgcggctgtgtatagtctgtttctttatagtaaggaattatttatcaaaacatagcttccatgcctctggcatttactgttaacccattattttctggactttggcctccttgacaggtattttaaaatcaatgtaactcaagtatccagtggggaaataggggaatgagctttgatcaatggttagcacacctacatcctttgcaagtattggtrtggaggtggatgactgatcttctagagtgcccctctccttcagtttgtttgctatgataggcattccagagggtgtgtcagcttagttggaaatactcgtggcgctctttaacagaccaggaagcagactgtccctaaatgaaatactccatctgttgtctcaaaagtgttaaactagtttcattttcttttgtggcattctacccacagctcatttcataatttatgtaaacttaaaagtatagggggctgttgatgctagaaagaagaggaatttgtggttttgcttttaaatagtgcctgtgcatgggctgcctcctagtgcttttctgttttggagagaattacactcactttgtgttcaagcacctatcttctggtttggactaaatccagctccatagctagccttttgttttcatgggaagaataccaaacttccatgttagtctttaataattttgttaaggcgagctagtgtttttcccttctgattagttacaaagcctttgtacattaaagtttcctgatttttttttctcatgcttttgaataacaatatactctgaataaaccaagtatattctaaaatcttctattttgggccttattaataagaaatggacttttagaacgtttgaaatgttgaataatgaagtgactaagtgctacacacatactataataaaatctcttcaaacgagcatggtctaaattcaaaattttaaaggggaatgtgtagttcttatawccagtcactgaaacagatgaggctttattgcttagaagtaccaacatagttttaaaaataataactgggtaattaatatattaatggtatatacaggggaatttggatttttcttagtggtgggggaagtaagacacacaaatgctccatgtggtcatgtgttatagtgccatagtgcagcaaaggtagacggagattacttttgatttaagagattggagcagagttcacaggaatgggtaagaataacatatcagtgagaaatgggtggggaaaaatgatttcaggagaatagtatgcactgtgggaggaagcaggaggtagatccagggttgtggtgggagtggaggtatctaattgactctgtccctagcacatgctgtcacagggcactgtgtgggcagctggcaataagctacatagataatgaatgctgggctgggatggcctggggaagactgacagcaaggaagggactttcgggctagtctttgagggaagggaaggatttgattaggaatctgggtgttcttaagagcatagacaccaagacaaaaacaagggcagtaagaccaattttgctctattgaggttgagaagaaaaattaagttagctggactgaagaaccttgaatacaaggctgaagaacttaaatgttatcaggaatgattttgggtttcttgatactccgctgcttagaaacctgtagtgattagagcaatgttttgagaatatgattagaagtatgtggagaggttttggagggtggaagaaggaccagaagcagaggcatcagttaatgattgaataaatcttgtaatgatattcaaagatgtaaaagttaaggtagatgggctgggcacaggggctcacacctgtaatccctacactttgggaggctgaggcaggcagatcgcttgaggtcgggagtttgggaccagcctggccaacctagtgaaaccccgtctctaccaaaaactacaaaaattagattagtggtggcacatgcctgtaatcccagctactccagaggctgaggtgggagaatcacttgaacccgagaggcgaaggttgtatgagccgagatcttgccactgcactccagcctgggtgacagagcgagaccttgtctcaaaaaaaataaaatgcagggttgggggccgatagaggaattaattttgcaatttaatacccaaaattgaatatttgatgccttgagggagaatattcacttagtcaatagatatttaatgagcacctattatgtgtgatagacactgagtttacggtggggaacagaaagacaagtggtctctgcccacayggagcctatatttaatgagagagacaaaaaacaagtatatataaaaatatatatactttatatatagttatatataacaaatatagttaaaaaggatatagttaacaatacaatatatatatatatatgaaggggaaaagcaaggtaagggataaggagtgatgaaaagaggggagtgttttagagtcytgagagaacatttgaatggagacctacccaaagggagggggagagggagcctcctgacagcctggggaaagagcatctctagcagccagttgtaggccttgagtgcctgagaccagccagatgttctgaatggagtagagctggaaagggaagagtggtaggaatgatatgtgcagtgtaaccaggaatagagcctttagggtcctgaaagccatggtaaagagtttgattttcctttagmtatgatggaaaggcacgggagttccttgatgtttttaaaagatccctatggcagcagaggtgataaggtggtggttcagatgaggcctaaggcaatagtgatagaggtggtgagaagtgataggattccaaacatattttgcaggaaagaggatttattgatgagctagatgtgggctgtgagagaaagaatagaatcaaggactaccccccatggtctgtatggtgaatttgtctgaattagaaaaagctaattctgtctctggccagaagcagaagcacttctcagcaccactgggtaaagaagctcccttcctcccagcacatgtacctgggtgctaggacaccttggtgggaagagcgtgggctggtaacccgtgttggccctgtggccaggcatccttgtgaaggactcaacctgcataagtgaatgcagcagcactggatgactcctgagtttgtggcctgagcaagtgggtgaattgtagtgtcatccccaaactggggagactagaagaggagctgactgtgagtggcagaagacagggcaaagcaaattccattttgggtataagtctgagatgcccattaaaagtcctggaagcaatgtcaagtaggcagatggctatgaactggagccagggtgagaagccggcaggactgttgctgtttttgagtttgaagtgactatcaagtggagctgtaggactggagcttaggagaaagatttagattaaagatggggaagtcagtgtgcccagaggaatagatgaattctttgagggacattatattgaaaaacaagaagattggactgccttgggagtaktatttggcagtggaaagtgggtaatgaatctgcaaagcagcaaacaggaggaagattagggtgatggagcagcatggaaggcaagtcgtgagagggtggagggtgctggggggatctgaaggaatcagggcttaggaagctgctggagctttggagagcgctgtttagaggtaacaatgagtgtgaaggtaattttcagggaattaaaaatatactttcaggaaataagcgctgaagggagaacaatagggtcaagtgttgctttttaaaaataggatgaaattgtgtctgttttaaggtaaactgagagaaccaatgaaagaggaaaagttaaagatgctagaaacaaaggggatcagtgagggaacaagaacagggcatctagaggataagtgtttgaaggaatagataaaaagtagtctcaaaaatgaggaagctttttactttgagcgatgaaaacagtttttatctttttagcaaagttgtagttaggatcttctgtctgtttttaggggtctccactggtattaaaggcctgaagaaagtatggcgggaaccaacaagaaaaaaaaattgtcaagcagtaatgagagaccaggtggaaatatggagaataatctgtaatagccagtcagtattctgtggtccaagagcaaaaagggaattgagaattcagagttgaccccattaaaaaagaaagacattaaggacacctgaaacagtggtttataacccaraaaagtgcatatcaaagtcacctggagactttaaacaaaattatgggctgagcatgttggctcatgcctgtaatcccaacagtttgggaggccaaggcagaaggattgcttaaggcccggagttcaagaccagcctggccaacatagtgagaccccatctctataaaaaacaacaaactctatgcatttacctcctttccctaaaatgtatcggattgaggtgtaggagtaggacaacaagaaatgggagagatgtttatgtatgtttttagaacattctgggtgatgttcttcagttctttgttccacccccattccccattaagaaaactgttctggactctgggcaggaatagaaaaggatggctggaagggaagctaaaggactaagtggaaagttttttgaagtggtatcaacacaaatagtaatagtagtattttgggggtgtgctcagctagttaagttcctgtactgcagacctttacagagtctttcatatgctcatgaatctccaagagggggattgaatattttaagatcatatacaaacacaggatccttattttcatgggccatcttacggactagtttctgcaaattacactttgaaaatgatgaattagagaactgcagcaatgatcagttccagttaatttggaaggttcatgggttttggaagggggaagccatactggaaagggagaatgtccgggttaagatcttgaagcacagttccaggctgtggctttgttggtggagagctgggttactttccattccccagttaaacttgttttctaccattgagtccagtatcagttgagtcatcaatatgaatgttgaagttgcaaagtgtaagacaaaatggggaatttatgaagtatttacaaatattctatggtcaatagtttaatttctcatagatagggatggataaagtctttatgaaagcagaccaaaatccaatggcttttcaaataactagacttttcctcttaactataagaaaaggaaagtgggtaactgtcaaaagtagatacactttgaaatcttggagcacttaatagaggtgacttaatattttggagttgagaaacttttaaacacagcagtgtcataagttctgagaatgacccaatttgtaccacctgggcattgaactgaaggctgtctttccagtgaagtaaagtttaagatgacagttaacactgaatgttctctcwtaagatttgcaaagaagccagtgattggtgaggatagtgattcttggcagggattagacatttatatagcatgatttaatttttaataatgtgaattttatcagcatacagacttcctcacaatattgagacatagaaaatgggaaggcttctaaacaattttcagttgccccaactgtatgagtttcacaaaattccattctcttctgccaagtgatattattccattccttccctcgtgtatcttatctttattattgaattttccctcacaatccactgttaaaagaagaaagtatcacacacgwgggttcttttggctatggaagtgtccttgagatcactttttgcacgtgactcagctgaagtgttcaaagcacatggaaatcacttgccagtgacaggtggacgttgtatgtgttttctctctcctaaggatgcctaaactttcttttcttcacaggtaaagtcagtgataaatcttttgtttgctgcmtatactggagatgtgtctgcacttcgaaggtatgtttacaggatggattagcatgcactttacagatatttatgaagttgcttctgggcgagcagccattttaaggttaaagtctcacttttctttccctttgataaaaatgaccccaacaaaatttttattaaataggcacttccagtgccttaggcctgctttccaatcttgtccttttctgcctcctataaaaaagaccatatctctgtttccccaagtagtaactgttcagctaatctggctaattagtaccagtggcttactggaattggacagtgccttctcactccctgtctaccctccattcccaatctttgatatgtgtgtgtgtgtgtgtgtgtgtgtgtgtgtgtgtgtgtgtgaagcagctggggggtttggtgtctggcagatcatcaggattagtaaggccatatactgctgtatacctaaggtcttttgtgtagagttgtaacttattttcttttttttttctcccattaatacctcaaataactgattttcaaagtggaaaaatgtctgtgcttcccccccttgttttgaagtctgacaagtactagtagactgtgaaatgtttaagaatgggagtcttagtaaaacatacaactttactatagggattagtttcttgcccttatgagacataaaccttggtacacagttgtgccataattcttaggttgcgaacaataatgtaataaagtttaattctgtgagagatggttaacatttaatcttacctaaaaaaaagcaaagctgaggaagagaggtgaagtggcatctacccaaaacacctgtgtactggttaataaggtcggtagttcccattaatgagcttgatgaaggatggcacctgacagggccttaaatgaactgatggagtgaatgttaccagtgtgaattaaatttgctttatatataataaatagctgtgcttacacattttcagatttgctttgtcagctatggacatggaacagcgggactatgattctagaacagcactccatgtagctgctgcagagggtaatacaggaactactcctatctattttctttccagatttaatttctacttagtactaaaatctgctctttttttgggggtgggacggtataggtcatgttgaagttgttaaatttttgctggaagcctgcaaagtaaaccctttccccaaggacaggtgagcacttatgttaccttctaaatatgtcagtattttattatgcaggactgtaatattcaagtgatgataatatttcaacctactaagacattcttgaacctgctatgatatcttataaaggcaataaaccttgtttctactagataggtaattctgtctcccatatcctgtttcttatctaagaatggtgtcttatttagaaattttcaggttgatttgaccattagtcaatacactgtatgaacaaaacaattttttttttgcatttgggaagaaagaattggaattttatcctcatggattttaaaaaaaaaatttttaaattacactttaagttctgggatacatgtgcagaacatgcaggtttgttacatgggtatataagtgccatggtggtttgctgcacccatcaacccatcatctacattaggtatttcttctaatgcgatccctcccttaccctgacccccaaacaggccctggtgtgtgatgttcccctccctgtgtccatgtgttctcactgttccactcccacttacgagggagaacatgaagtgtttggttttctgttcttgtgttagtttgctgagaatgatggtttccagcttcacccatgtccctgcaaaggacatgaactcatccttttttatgattgcatagtattccatggtgtatatgtgccacattttctttatccagtctattatcgatggtcatttgggttagttccaagtcttttctattgtgaacagtgccacaataaacatacatgtgcatgtgtctttatagtagaatgatttataatcttttgggtatatacccagtaatgggattgctggatcaaatggtatttctggttctagatccttgaggaatcaccacactgtcttccacaatggttgaactaatttacactcccactaacagtgtaaaagcgttcctatttctccacatcctctccagcatctattgtttcctttttagtgatcgccattctaactggtgtgagatggtatctcattgtggttttgatttgcatttctctaatgaccagtgatgatgatatttttttcacatgtttgttggctgcataaatgtcttcttttgagaagtgtctgttcacatccttcacccactttttgatggggtttttttgttgttgtaaatttgcttaacttccttgtagattctggatattagccctttgtcagatggatagatcgcaaaaattttctcccattctgtaggttgcctgttcgccctgatgatagtttcttttgctgtgcagaagctctttagtttaattagatcccatttatcaattttggcttttgttgccattgcttttggtgttttggtcatgaagtctttgcccatgcctatgtcctgaatggtattgcctaggttttcttctagggtttttatggttttaggtcttatgtttaagtctttaatccatcttgagttaatttttgtataaggtgaaaggaaggggtccaggttcagttttctgcatatggctagccagttttcccaatacctttccccattgcttgtttttgtcaggtttgtcaaagatcagatggttgtagatgtgtgctgttatttctgaggcctcagttcttttccattgctctgtgtatctattttggtatcagtaccatactgttttgattactgtagccttgtagtatagtttgaagtcaggtagcgtgatgcctccagctttcttctttttgcttaggatcgtcttggctatgtgggctcttttttggttatatatgaaatttaaggtattttttttctaattctgtgaagaaagtcaatggtagctttatggggatagcatagaacctataaattactttgggttgtatggccattttcatgatattgattctttctagccacgagcatggaatgtttttccatttgtttgtgtcctctctttatttccttcagcagtggtttgtagttctccttgaagaggtccttcacatcccttgtaagttgaattcctaggtattttattctctttgtagcagttgtgaatgggagttcactcatgatttggctctctctttgtctattattggtgtataggaatgcctgtgatttttgcacattgattttgtatcttgagactttgctgaagttgcttatcagcttaaggagattttgggccgagatgatggggttttgtaaatatacaatcatgtcatctgcaaacagagacaatttgacttcctctcttcctatttgaatacctttctttctttcttttctgagacaagagtctcgctctgtcagccaggctggagtgcagtggcaagacctcagctcactgcaacctctgtctcccaggctcaagcaattctcctgcctcagcctcccgagtagctgggattacaggcgtgtgcccaccacagccagctaatttttgtatttttagtagagatggggtttcaccatgttggccaggctgctctcgaactcctgacctcaggtaatctgcctgccttggcctcccaaagtgctgggattacaggcatgagccactgtgcccagcccctttatttctttcccttgcctgattgtcctagccagaactgccaayactatgttgaataggagtggtcacagagggcatccttgtcttgtgccaattttcaaagggaatgcttccagttttttgcccattcagtatgatattggctgtgggtttgtcataaatagctcttattattttgagatacattccatcaatacctagtttattgagagtttttagcatgaaggtgtgttgaattttgtcaaaggccttttctgcatctattgagataattgtggtttttgtcattggttctgtttatgtgatggattacgtgtatcgatttgcatatgttgaaccagccttgcatcccagggatgaagccgacttgatcgtggtggataagctttttgatgtgctgctggattcagtttgccagtagtttattgaggattttcgcatcaatattcatcagggatactggcctgaaattttctttttttgttgtgtctctgccaggttttggtatcaagatgatgctggcctcataaaatgagttagggaggattccttctttttctattgtttggaatagattcagaaggaatggtaccagctcctctttgtacctctggtagaatttggctgtgaatccgtctggtcctagacttttttcggttggtaggctattaattactgcctcaatttcagaggctattaattactgcctcaatttcagaacttgttatcggtctattcagggatttgacttcttcctggtttagacttgggagggtgtatgtgtccaggaatttatcaatttcttctagattttctagtttatttgcatagaggtgtttatagtattctctgatggtagtttgtatttctgtgggatcagtggtgatatcccctttatcattttttattgcacctatttgattcttctcttcttattagtcttgctagtggtctattttgttgatgttttcaaaaaaccagctcctggattcattgattttttgaaaggtttttcatgtctctgtctccttcagttctgctcttagttaattcctgtcttctgctggcttttgaatttgtttgctcttgtttctctagctgttttaattgtgatgttagggtgtcaattttagacctttcctgcttactcttgtgggcatttagtactataaatttccttctaaacactgctttagctgtgtcccagagattctggtacgttttgtcttttgtcttattagtttcaaagaacttatttatttctgctttaattttgttatttacccagtagtcattcaggagcaggttgttcagtttccatgcagttgtacagttttgagtgagtttgttaatcctgagttctaatttgattgcactgtggtctgaaaaactgttatgatttttgttcttttgcatttgctgaggagtgttttacttccaattatgtggttggccaattttagaataagtgcgatgtggtgctgagaaaaatgtatattctattgacttggggtggagagttctgtagatgtctattaggtctgcttggtccagagctgagttcaagtcctgaatatccttgttaattttctgtctcgttgatctgtctaatattgacagtggggtgttaaagtctcccactattattgtgtgggagtctgagtctctttgtaggtctctaagaacttgctttatgaatctgggtgctcctgtattgggtgcatatatatttaggatagttagctcttcttgttgcattgatccctttaccattatgtaatgcccttttctcttttgatctttgtcggtttaaagtctgttttatcagagactagcattgcaacccctgctttttttttttttttgctttccatttgcttggtaaatattcccctatccttttattttgagcctatgtgtgtctttgcacgtgagatggatctcctgaatacagcagaccaatgggtcttgactctatccaatttgccattctgtgtcttttaattggggcttttagcccatttacatttaaggttaatattgttatgtgtgaatttgatcctgtcattatgatgctagctggttattttgtccttcagttgatgcagtttcttcatagtgtcaatggtctttacaattttgtatgtttttgcagttgctggttacccctcgtggagtttttaacaacccagggtagacaagacaaacctttagagaagcataaactttaagatgataattaacactgaatgttctctcttaggatttgcaaagaagccagtgattggtgaggacagtgattgctggcagggattcgacatttatgcagcctgatgttgtttttaataataatgtgaattttatcagcatacaaacttgctcacaatattgagacatacaaaatgggaaggcttctaaacaagctaaaatgtataagaaaactgttaactctaaaatgaatatattggagtttgttgaaatttctgcatttggttggaatcagtttcagaaggcttcatgaagttaaattttaatcagtgctttagggaagagacgagactgaaggcacagaatgaaaagaagggcattctatctatagtgggaaaaatatgcctagaatatattctgctcctctcctctctctcctggtcgacatagcaaactgctattcatcctgcaacaaatgatgtcaacaaagtggtcagggaagggataagaatgcagcttacacatatacatgtacagtaaactctagattcatatccttggacattatgtactggagtagagtatatgagtcaatgagtaatgagaataaaagtttagaatgggaaaaaaacgcatacttgatggtggtttgatatgtattaggagtttggattcatttgagaactgggagctgtattaagtttggagcaagttgattactctttagctgtattgygtttctgtttattaagcttcaattttttttttttttttttttttgagactgggtcttgccttgccactcaggctgaagtgcaagtggcatgatcatagttcactgcagccttaacttcccaggctcaagcgatcctcccacctcaacctcctgagtagctgcaatcacaggcaaacaccaccatgcctggctaatttatttatttattttttattttttattttttgtagaggcagaatcttactatgttgcccaagctggtctccaactcctgggctcaagcggtcctcccatctcagcctcccaaagtgttgggattacaggtgtgagccattgagcctggccaactatcttttttaaaattagggcttgggttttgttggttcagctgttagcttgcaagaaatgcagaaaagttatgtcagtgtctgacaaatgttagcaattttgtaagtttgctaacactttggttatctaactttattcctatagttgtaaaaaagcactatgattaaaaactcctttattggcagtattctaaaacctcatgttaggttgacagtcttcttccctttccccaaattttaatacccaccccaggtttctaaagcaaaaaattgaagagcattttcctcctgtgtttataatcccaactaaaacactatgtaatacatgttggaaatattactgtgctttgtatatgtattaatttyttttgccctaaattggcctctaggaatgtgaaagtagatgtacccacctgataagaaaaagtgagctaagtaactaacttgataactaggcattcaacaagtctttttctctatttcatagaatcagtgtcaccttaaattataataggtttgcacagaattcgtgaattcttgagatagagtcttgctctgttgcccaggctggagtgcagtggcgtgatctcgttcactgcaacctctgcctcccaggttcaggcaattctcctgcctcagccacctgagtagctgggattacaggtgtgttccaccacgcccagctaatttttgtatttttagtagagaggggtttcgccatgttggtcattctggtcttgaactcctggcctcaagtggtgcacccaccttggcctcccaaagtgataggattacaggcatcactgtatctggctgaaattagtgtattctttaaagttcatatttttcattaattcacagaagaattgtaaaaaaggtaacacgcagttgacattccatttttccagaaagacagataattacatactgtagaggatgactcaaaagtctgtttcaagccactgacttcctaaactartgaaggcctattcaaagtcacttaattcagctgtttttttttttttttttttgataaatacaaagatacatgtaaagttttacttacctgattttaaaaacaggctaccaaaatttatccaaatatattaaaaaatgagactgttttaaaaacctttcgtttccatattgtgactccactaagcgggtaaaaagttcaggacagagatggaaaggaaagaaggaaacaggaagaagtgaaactaggaaggtggtgccagtggcacatggatgaagaaagagagatcatcagccatggagaattttgtaatgtaagtagagagagagattgggtaggaagacaggcttcacagtttgtaaagtgtaagggaactacccatcgtaccctgtcattgactagggctgtgagttatgtagttctgtctcctcttgcaaaagacttaccacttctggcaagtgattaaccacttctggcaactcttcatttcttcttatccttgaatattcatctacatcactctaaacagcacagccccagaagcatggaaaggggagttattagtatggaaaggggagttactcttctggtgtagtggtccgattgagtccatggcttcccagccttaccagaggtgataaaaatgtcaattcctttggggccaatcttgctcctccagtgtgttttagccctaatgaggtcatggttatttctagacttctgagacttactgtggctttgaattgacacaaacactaattttctgtcaaaggctagagtgatggatgttatatgcctgaattttctttgaacattttattttaaaagagatactttgggcttttcatgaaactaaaattctggaaccctagagcagtctattatatctgtcaccacaaggactttccttaaaaagctccctccataagcacttggatgtgtaaacaagatcctttcacagatctttttctcttcctctccatatcccaacttgtcttggagactactttttgaattataaatccctttctgcatttctattattaatttttatttgtaaaattgctaaaatagctaaatttggccatttaacctgcatttaaaatctaggaatgtggggtgatcatctttgtacataaattacctaatgaccctgtccatgctgtgctacgtgtttaggtggaataacactcccatggatgaagcactgcactttggacaccatgatgtatttaaaattctccaagaataccaagtccagtacacacctcaaggagattctgacarcgggaaggaaaatcaaaccgtccataagaatcttgatggattgttgtaatggtctcaaatcccaagatttaaatcacttacctatttaattgtggaaaatgattatgaagaacatgtgtatttctatctggtagtgatgtatattttacatttgtcatttcagtgttactggagttttcttcattgtgcacacaggacaaatctgatctctttgggaaaaaatagaaataaaacaatctccctccataatgtgagcaatattacctcgtgcattgtataatttgatgtaaaagaaatagttaccaatgctagcttgtgtggtcttccatgatttatttgtgttttgtgaattttcaatttatggtgatgatctgctgatatgcatttataaagtaagctctgttgtacagtctgtccaaatgggtcaaggttgcctttagaagcaaatagtgtgattttcaagacttcaaatacaaatttagtttaagtgtttgaacaactatatgcacttacggttgtgtgtttaaaatgtctctctcwcmccctagcttcatgatgtgactcttaaaaaactataatagttaacaactgttagtaagatagaccaattctgattagactttatcagggaatctgtttaagatatgtttggtgaccaaaacgtatgtgtgaatgtagttataatgcttttgaaaaattttcctttttctatatccccttagtccagcctctcttctcagacatttagctatctgcctctttcctttagctgggaaagtgagagctggcatactatgcagtttttatgttttccatagtaagtcagaaaatgcctcctatttctggcatcagaactttgccatttgtctacagaagacgaaccagagacaaaattactaagtataaattagtcaagtttatcagtctaaaaarcgaagggatgtgcaactgcagctctttaagaagttttttttttttagcttctagggtaaagataaattcagaaatgctctaagctaccaragttattctgaaagtatgggaactgctacaactaacaaacatttgtttccaagcctgtcattaagagtctgcatcaagagatttgtcctccttgggggaccactggatcattccagatttcttgtgatttttctattgtgtaattcttggtgggctctgtagtttaataataagaaaaaggccatttcattttaaattgtgacctataattctttgtcttgggttggtaattcaggattcatttggaaagtgggtaaaaggggcttcaaaaaacggatagaacaggattttctaggagttacacatacattttatcctgtcatacctcgagataaagtggcatgttagtgaggagttctgatattaagcacacacacacatgcacacaaatggacttctctgaagctgtgtttagtgaaatgagctcaagtacatgaatgttagttgttatcacatacagcaaattcctttttttttctttttctatgagcacactctgctgcttctaaactttacatgcctgatggcaccttactccagcagcctccaggtgctttcattttcacttccagtctaagccagtggctcctgccactgccctcccattacctagatggcacctcctttggtgaaaccacggccaatgttccttagctgcaccaggccsgaagctgttcccatgcttgagcttccatggggaggatgctgagtgagcagtttcctacsccgtggatctagcaagccatggagacaggtagcatttgtaagatgctgcacaggagcagcattatccccaaagatattacagggtagacacgttttaactgaaatcaatcaagataactttattcaaagagcagcccgctttgtgtgactaaaatgaaacaagacagttgaattgtgtgacttgaagattaccaatgattttgaggcttttctataataaaaagaggttctaaccattatttgggaacaaagagagttttcatcttttttcagatcaaaaccattctgtaaaatctttgttgtttaattaaatgtgccgttatttacccctgatgttatttatgactatgtgccgattcctgctygggctgtttgctgttggctggtaataatatatttgatttaaatgctgttgactgtgctattaactgctgccgtcagtaaactccaaagatctttttgttttggctttagtatcatatgtgctttttctgtatcctgagcgctctatatgatcatgttaatttaaagctttatacacattgttgtttttgctggtctcatctttggtaatatgctataccccactgctgcccgacactgccctttagctgcagagctggattagctgttgaccatttgatgctgttgtctgtctggcagggactgaatgacctgatgtcagatttagattcttcctggggattacacagctatgaatgtatttgcttctaaaacctcccaaagtgaatctaatcttaaaactacaagttgtaagtattctgaaattgggaaacatttattttaaatgcaatcaggtagtgttgctttttacagcataataaatatatgtatcaaaaaaaaaactgtgtggaaaaaatgaattttcttaaaacaattaagagccaggaactccactgagcatacagaccatctctggttaggttccaatccatttctaatgcctgctataaagctaggtactacacaaggtgtcagatggggttgccacaatgactaggacaagaatcctgtgtagagttcacctttgaaggtgagggatgtgcaggcatgtctctagtcctctagatgcaaacactatccttttacagttaggaagtgctcagtaaatatttgttgaatggaaccagtaaacatacccttgaatgagaagagaggttattttcacaaagccttgaaatttatttagagagttgaagctagtactgccacactagaatctgagtgtcaccagccagtacacctcagctcctaatttattctgcgtgggaatagcattcgcttccaatgccagaaatccctggtcttcagagcactctttcctttcaggccaggggttagtgtatagttttccaaccatagagaaagtacatgaacaccatgactgttacattttcatttatcaaagttatctgtcacaaagtaagttacttggctagaagagtcactgcattactggcattgtagaactgtgatgagccaggtactatgcaaggtgacaagtggggttaccacaatgattagaagagacatcagaaattctctaatctaactcactcttcttttatagatgaagctgagacccaagagtgggctgtgatacagaactcttagtcctgcgctgttgttctacgtcctacaacactgattatgcccagtatggatagaatatacatattagcttattcatatgcactatctcctattagctaaggcctcttctctgctgagttttaggcagaggcctaagtgctacaacagaaagtcctgcaacatatagtcaacttcagctatatatatacatatatatatatacacatatacacatatatatatatatatacacatatacacatatatatatacacacacacacacacacacacacacacacacatccatggataggagcaggatatcagtgcaggcacaacaaatgtgtgaataatcctaaatagtgaatagttatttttattcttgatacaagatcattttatttttgtataacttttttaggagttgggataaccttcctaattttacttgctaataatcctcatagtaaaatgagtaaattcataaatcatataccagatggcccagggaagcagcccatgaatgtgttaggtggcacttataaaaaggctttttgggaaaggataatcttttatagttatgcaaggaaatgatgtgattcactagattatatgtgtttggggatgagaaagattagaaaattaaggcagttttttaaaaaggaggcatgagatacagcaaaacaactggatggaaggcattaaaggcagagactggggggttttatttctattctggagaatgaaccagactccaggcctgtgtgcgcccccactgtaccccttgcttcctttccaaatagccaataaaaggctgcaatgaagtgtgtctgacaagcagtcccaatggcaaaagaatatcaagactgtttcaattatgtagaagaaatgtggaaaggctgcaaacagacactgacagtaaggtattaaggtgttataatagctttatgaaatattataggagaattcagagtttgataataggtatttgacagctttctacctcttagatagctttctgttctctgtagactcaagataacgttaataaataagtttaagactgcttaagtatggctctgttgttttttcctttttacaataaatcaagcaaggtgtttaatttctcagtgagtgtagcaaacacataaaccaaagtgagttcacaaaaacttggaagctgaggattatcatttaagagcaatataaactgatcttaaaaagctctaaaagcagtattgtcttcagctttcctaaaactggtttaaatgtcatttctttgaaattgtattttttaaatataacatttacattatttgtagcttctggctgtttgtttgcatcacaaaatcttaagttttaataaggtgactgcactagaatgtatgatccagtgtctcagaatatcttaagttccataaaagcagggatctttgcttttgtttaccaatgtttcccaaacacctagtataatgcctggctcatggcaggtgctctatataaatctgatgaattaattaatgaatgaatcataactaaccaaaggaagccagtcacataaatggtccttactttgttaatgtcccaattcaaaaggtaagcagaagagttttcaaaacactttctagctttttcctgtcctttccctgggttagtcagtgacaggactgctctgttcagaaagacttgccttcatattccactttagctttcaggcaataaatagatttcactcatttcatgccatctcagaaaaccctctttcctttaaaatgagacatttgtccccagtagcacacataagctctatgcttataaaacacttttcaaacttagaaacaccacacgagaaatactcaaacacaaacaaatatcccttaagttaggatctactcagtgacttcttataatggttaattatgtagaatacaaacttacactagttagccagggcatatttactttactccttggagagagaccactctcagtgttcactataaataagctttatatttcctagatgtaaatacgaagatatggagatgagaataatcattctggttatgatgccaacattcattatcagggaataacactattccatgataatagctaaatacaacttgacagactatgcctaacttggtaattatgcctcttacccttttttccccaatacacagtgtattttactttgagaagacctggccttctagcttttgacatctttggaaaaaaatggcagcttttttgtgggtgcaataacttctcagtaataactcatctaatcgtgggggtgtagattttagatgactgctttggagacaagacaaagtcccatttctcatgtattttaaaattaaaaactgctaatttgggggtattagcaatacccagattcattttaaaataagtgctgaatcatctgtatatttggggacagctgtggtcgcaaagaaccaaaatacttttgtttgtttgctttttatggcacctattacagctgtttccaataatattactcctctgacctcttccattgacatgtcttaatctgccatagcaattctgaatatgtgtagggcaggtaaggacaacatttaggaaaatagtgttattgatcttattttaaaataaggattgaggtacatgagaaaagcatcaaaccaattcataacgtcagtaattttaagaatctttatattaaatactattaatgagagattaatagaattttagaattttaatacttcttaaaagtaaagtctcttggctagtgcagtaaaatgaaaccatgccgaattcccaaagggcaaaaagaactgacagctaaacctcagcaattagaaacaatattgttttaatgttgtcttctttgttttttagtcatttcaattgtaaaatcaactgaaacttaggttctcgccatctatataaaaactgagagaggaggcctcagattgtatgcagtgccacggaaagcactgtgtgcatattatatttaatgcaatacagatactttagctttaattttaaaacaaaactcaagaaatctttatctccaccaaagaagaatacagcatttgcatgataatatagttgtggtagcagtagtggaaaaacaagatacagccacatagacagcagtatgtaaaagggaagaaccttgtcaaacccatctcttaatctactttttgtgtcagtgataaggaaggaaaaaggtaaaaatacagtatacttcacgaaacatcatccactcaaaaaagtgtctggaaaaagtacaggagagagaatggaaccattcgcaaatgtgaaaaacacatatatcagcgaaacatatgcagttctcaatgcagttacataggaaatgagttttgaaatgatctgattctcatattatctctggtgtattattcaagttgtcagttactgctttttctactcctttcccaattttgtggctaatagactaaataccaccctaataacaaaaaggacaaagtagcccatttaagaaacatgaattaaatttctgagtttatctacatctatggttaatttcaacttttgaatgagtggttgtgaatagcctaactcccttgggagaactgtaaaaataattgtatgtgaccaagatgaaagcagaatgtattcagctttggatatcaaacacaacttgtgaatttggaaatgtacatccttctattgatattagctagtgtcattaagccataacaaacagtaaagctaatattctcttctcaagaaacagaatttgtctttgtctttaaatagccaatgtgaaagatgtaataaaatacacattttccccctaccagatccatgatggctacctttgaaagaggactgatataattgtatataaacttggctttgaactatttcacaggtaaaccaatggaaaactgccagttacacttaaagcaaagaaaacatgtaagaattctcccacagaaatttaccgttcctacgtcaagcagttccctaaataaccactgatttatccaacaacctataacagttgggcactgactttatgcataacatttgctagatgttgcttaacttctcctttcccaaaggaccctcattctcgtcctgatactttgggtgtatctggatgtttttcacttgtgaaacccactcttcagagaatgcctttcaattttaccttcagtaagatgcatgatgcccttcagagtaactgatgtttctgagttagagaaaaattcacttgctatcaacaggttgcagcgaatttgctggcctttctttcatttccctagaaacacaggatgtgaaggaacagagtagcaggagggaatcacagatgagaaggaaaactgtcgccagagaagatgaaaaaaattcatgctctatactgtgttcatctgtaaaaagacaaaatgtggttaagtttattacactgatcttgtgaaatgcagactcatacattaaacattgcttgtctattctagaatgaagtagtaggaagatacttgcaatggcaaataaataccrtggaataagagggccttcagcatgtactatgtattatcctgggctaatcaagaccttttatatcacctaagctgacggattattactctgctgcccactggcttaattttgtgaatccatccagactgcataaagctttttgctgttatgcaagtctggggacagagcaacgtgtcaaatctgctcatgtgaaacgggtgaggaaatgctgagccatatgccagagggagagaggaaggagagggaaatgatacacttcccctaaaggccactcagtgggtaaaatcaatgactgtgtttcaggtacagactaaagaagcagaattactaagaaccccttcaccctccccaccagtgccttctgcccagctgccttgaccaggacaacttatagtaagtaaactgttcatccaaaggatactagcctgccagtgacttcctgtctgacttccacactggtctttccccttagaccagatgctttcaatcgaggatgattctgtcccctggcaatggctgaagacattgctgattgtcccatctggctgtgagggtgcatgtgcttactggtatctatttggtagaagccagaggtgttgctgaacctcctacgaagcacaggaaagctccccaccccaccaatccccaacaaataattctgaagccccgaataccagtagcaccaagactgagac

SEQ ID NO: 95290 - DNA, 49352 bp, Homo sapiens
cctccggggtgctgaggagaaaagtagcccctggcgaatggggagaaagccctaaagcagggtggtggtggccagtggatcacaccttccacctgcacgacggcctcctctgcaccctagccccttataccaccgtccttccccttctccctgcatcccacaaagtgggggccctggatctttctcccctcccccctcccctccatttcctctccagctccctccacagccgtaaccagtaaaacaggcggccagctattatgggatggctgctcccagcagctctgcagggagggggcggtcaccgcggaatgtctcttgtgggtggctattatgggatggccgcctctctttttttgggggggtaaggctagcgaggaggattattatgggatgtgccctgcacagctgggtggggctgtccaggagaggtgaaactctagggaggggtggggagggggagggaaggaagagggagggaaggagctggggagggtagggtgagccctggagtcggacctgaggcctggcaggagtaactggctggagaggtttctttggtgacagctgtttgaaggggcccctggggcaggctccagcgagccaaatctgaaccctggacacctgggtcctttaaacagcttgtgcgctacagggttgccctgtgagtccggggcctgcagagctgcactgcaaatgagaactgagatgttctggccgggtggcataccaaagggagtagtagtcatggatggcgatagtacccgtctcccttccatctttgtcttcctgggtttgagcctggggaccatagctcaggttgggggattgtgcacggagcactttgcttaggttggggggttgtgcacggagcactttgcttaggttggggggttgtgcacggagcgctttgctaccttgcagtcacacccaaaaaacagatagtaggttgcctcctgagatacaaacacctggcatgtcacccccaagccccacgtgatctgcatcctgtctagcctttggagtgcactgtcactgtggctttgcttccctcgttgtctcccaaaatccccttttcagacagagcaggagaacactgtggccccttggacctcttatgaacagagtttttcaggttcacacaaaacagaggtgtaaggagaggaattatagagcaaatgctaaaaactccatgaacaacccactctgagtgttgttctaggttcttctgtaccatgggatgaaaacagaactctaaggtaactggctagagaggctgccctcctgggtgcattaattaggagattatgccacccttagtctccctgggccagtcatgctagtggtttatttataatttatctgggagggtagcacggggctagaggagggaggggaagcgtagaagcataaggactacaaagcaacacaccagcacacacctccgagccctttctggaactcaagaagagaggaagggattttaactttctccttgttgtggtgttagggagaggtggggagcaagagcagcaaaggaagaagtgggtagaacctacaggaatagggacacagggtgagtagtggacaaaggatatatggataaataaaatgtggatatttttagtcacaggcaggaggctgtgactacccaaacgctctcttactggtttatatggacagatcactgtggaaatgagagtatgggtatgggcagatggagatattgcagaagggaatttgaggcccagagacaggctggatcccctggagaaatgagggtagaagagcgcacaataggcatctggcagccctctgtaggaaggagaaacttccctgaaaggaggtgtccccacatcatggtatctgaaaagagctgcctcctcaccccccattgtggaacacaagtttcattcttagtactcagagtaagtatgggagagggcttgggtaagtaaatggggcccagtcttgatgtcgagagcatttaacgagggaaactggaagccttgcagaacgggggagaatggcccgcttgccacaatgagtgcagcaagagggtgggccagggagctgaagggaaggttggaaaaagaaaacacctacttcaaaggtgacagggagcttttgacaggacctgatgtctttgatgccaaaaactccagtcctaagatgaggagagttaaatgtggaatgctagtgggtctacagagtcagccaggagctagcggaagacttgtctgcatccctggtgctctgctcaggagcagggggattgtaattccctgaggcaagctcttgccttccctgaactcatttctttgtaccagttctccagtcccttggatcctagagaaggggagagccatctggccaggccttcctctaggaaaatgagatgagaagggtaatgcagagatggcatgaggttcatcccactcactactggttagtaaagggccctttctacaaggaagtccaagtttcttttcaactcgtcccacttccataggtcttggacccatgcaaaaaaggtacatgagcagagggagacattatccttggcctggggttagggcagcaaggcagtggtgctgggacattggttttcactcaggtcctgaatctctgggagtcaggaaaagggaaaagtgacaggctgatgggttaggttttctgagggccaaagggttttaagattgggctctttcctggccaggcgcagtggctcacgcctgtaatcccagcactttgggaggccgaggcgggcggatcacctgagtttgggcgttcgagaccagcctgaccaatatggagaaaccccgtctctactaaaaatacaaaattagccgggcatggtggcacatgcctgtaatcccagctacccgggaggctgaggcaggaaaatcacttgaacctgggaggctgaggttgcagtgagccgagatcgcgccatggcactccagcctgggcaacaagagcgaaactccgtctcaaaaaaaaaaaaaaaaaaaaaaattaggctctttcctgaggtgggaagatcacttgagtccagaagttcaagatcagcctggcaacatagtgaaaccccgtctctacaataaatttaaaaattagctgggtgtggtggtgtatgcccgtggttccagctacaggtgggaggctgaggtgggatgatcacttgagcccaggaggttgaggttgcagtgagctgtgattgcgccactgagaccctgtctctcaaaaaaacaaaaaacaaaacaaaaaaaattcggttatttcagcttctaggattgggtccatagggtggctggagggtatgcataataagggaaggagatggtatacgctggagggctaccttggggcataattcaatgtagaaggtttcctggactgctgacttctttttttttttttttttttctgaggcagagtcttgctctgttgcccaggctgtagtgcagtggtgcaatctcagctccctgcaacctctacctcctgggttcaagcaattctcctgcctcagcccttgagtagctaggattacaggcacgtgccaccatgtcaggctaatttttgtatgtttagtagagacggggtttcaccattttggccaggctggtcttgaactcctgaccttgtgatccacctgccttggcctcccaaagtgctgggattacaggcatgagccaccatgccccgctggaatattgacttctatacaggcaggggaagatggggaacattatacaactaaagatttttttttttttgaggtggagaatgtggccccaacaagatgaggatggaggccattggagatactatgagacttcaggatataaaatgggaaagtgcctgaaaaatatgggacattgaggataagcaggatttggtgttcaagaatgagggaaacaatgctggtatattgtggagtctcttaagaaggaaggacatgaacatattataggatttcagtattaggaatgctggatggatgaacattgctttccaagaaaaatcccctagtaagtagggaacagataggagatcatgttgactatggtctatacccataaatcctttaagtatcatcttccagcctctagaaggaccacgataaatcttattgggatatgttctctcttggaaccagtgggattttattttctgtaacaggaaattgggaaacagtgctcagcagttctcccttggcaccattctgtcgtgtatcatagtttgcttggttgcttatgctttttgaagggaggccccctggtcttcccttgattctccatggtgcggagctcggccttgctaggtactctgtcaacacaggttgaatgaacatgagtagtggtgagtagcgggagggcaggccttcactcttggtgtgtatagagcaggaacctgagttcacatcgtgatgggatgtccatccccaggaatggcctgggggtgttggtgaaagatccctgacctggggatgtggtgagggggaggattgctagaatgttgagagatagtctttggatgggagttggtaattattatgggatgctgtagggtgaattagacttcatgtaaatgtttcatctgtcagcttggtattttggttggttggtgttcctcaaaacttaggagctggaggtaagcatctggaaaatacctagattttggtgggactgggtggggccctaggtgggctcccagcccccgagtgtctggaaatgatggtatgagggaagctggggtcccagacatcaggaggctttttgccaggatactactttggcccagaaagggattaaggtgtgtgcaagtgggggcggggacaaggaagcgtgggtagcctgcctggccctccctgctctgggtgttagaatagactgacagcgcctggagatgggggtgggaagaatatgaatattatgggatgcctggctcgaagggtataggggtggtagagtggagatgaagcattatgggatgtgacactgggttgtgttgggagtattatggtatgtttggttgaccacgggctccttgcaattattatgggatgtcaggatgtgggtaggagagtaaaattattatgggatagctttccagtgttagaggaaaagagattagatgtccatctgtggggcgacagtagggctgttgatcattatgggttatctttttgatagaggaggggtacttactataggctgtggagctagaagagggaaggctgggggtgatgtgagcctctagaccctggcctgcagggactgagggcagctctagggggttagttattatgggatgtcagtatagaaagtgggagactgattattacgggaygtgtgtgggaggaggccgagtgtccgttgttgtagtatggkggggggtgagtttctgactattatgggatatcaaactgggggtggatgaaggatggttattatgggatgtctgtgggggatggggctgaatattatgggatatgaggcataagtgctgcgaggggtgcttattatgggatggccatggggagggaggggtgatgaattattatgggatgttagcattaggtccaagagtgaagaagaagttggcaaaggatgtctattatgggatgtctaagagggttagttgcaaaaggtctgcaatattttgagatgtcagcagtctctggcatatgtgtatgaaatgtgggggggcagggtgtgtgtgtgttgtgtgtgtgtgtgtgtgtgtgtgtgtgtgtgttggggggggggtgtccgtgtgtattatgggatggccaggaggtgggcggttgcccaggtgacgcgcgcgcgcgcgctcgaagggggcgtggccagtggttgcctgagcgacgagggggcgggggttgcccgggagacctggggaggagggtggcggtagtggaaggggggggttggagttggttgaggttattatgggctgtccgtgggggggcggggcctgtgcggtgggatttcccggccggtgtttcaggccctttaagaggcgacgctggagccggagccattttccccccttcggccgcggcgaggaggagccggagcgggagtgacaccgagccggacccagcgcgacctgcggcggctccggggtgaggagagcgcggggttcccaaagagacgcccctcacggccctaccagccccgagggtcatcccgtcacccgccccttcctcaggcgtctccggacccgcggaccgccccttgcccagaggagccgacccttcctttcctggccctgcagggcgcccggcctcctccccagcccccgccctaaccctgccggagtcttgctccccgcgaccccccgcctccggcttggtctcccacaatgcccggcgcccaccccctcgccctttgatcacttgccccccgggacacgtggcccggcccccttcccggtgggacgctttcgccccccgcgtccctgcctccggccccccgcagcgcccgagcctccacgccccctcgtccccgcagctcttgaggagaacctgagttgtcccagaggacagcctttggagagctgccctgtctggggactggcccctccccgggcgcagggaggcgcccccccacccccaagtgaccttgtgtccccgagcgcctcgccgcctgcggcctcccctggcccccccgcgccgctgccactcggaccccctcccccgtcacaccccgctcggtccagccccgcgtctcccctccccgcgcttgcaccagcctgccctcggaggcgtcgctccctcgctccgtgggggcgcctgccggggagccggcttccgggctgcccccgaggagtgtggaactaagttcagcctgagcggttcgggtgccctgctagggtggctggggtggggggcggaaagagcgggtgggtgtgggggagggggacagtgcgcgtcactgactgttctgtgtttctcccccctcccccgcacagtgactcgggccagtgtagaggtccycaggccgccggcaggagcagctgggccaattccctggccsggagcggaaggggatggcgtcgggcytgggctccccgtccccctgctcggcgggcagtgaggaggaggatatggatgcacttttgaacaacagcctgcccccaccccacccaggtaacatcttccccaagrgcccatggcgggaaggagacatctggggctctccygagtgactcctctggtgaggcagggctgtgttgctccgctgtctctgtgcagagccggaggtggagggtatccgaagggagtggttcccttctgcggagctctggtgtgaggggggtggaagccatgtgcctcctgggcacggagatgccagcttgctgcactctgtcttgaggaatgctctgcagttcccagttgagggagctctctgggctggcaggcattacctggtatgtgggtcctcggaggaatgcaggtagctgggacccctggaggcttgtggtggtggtggtggaggggggcgttgaggattctgtttgaaagaccagccgggcatctgtgctagtagsatcctgtggttgctgctgtggaaaggaaagagggagtgctggttacactctatctgattatttttagcttctgatcggttaccggttttctgtgctgtctgaactgtgtgaagtttgaatcgcgctcctcagcaggatctggagtgcttaaagcagccaggcagattgctggaatgttttgagtggggaagtgatgggggctcggggaggatgtaatagcctagtgaagaggggcaaaagaagggagggcactcctcctcctggtgagtggacatagttttggcttttttcctagtggcttctgtctctatgaggtagcctgcggtttaggctggcagtgtgaagtgtctgtgtaggtgtgctaggggttrcgctatctgtgttttggggtggcttcatgaactggccaaacccgtatggttgtaaccaccctgtctgattgggggaactgttgtctatcctcaaatgatggttgatgtcatgcccctaagcagatgtctttctcttctgtgtcctttttcagagcccctagctgtgtcacctactcatctccttgaccttcatgttttctagtttaatttttttttctacatgtcatttcttcattccttctgcttctagttttcttctcattctggagcctgctgatcctgtttttgtttctcatccagcatcattcacttctgccttctctcttcttagcttcagtggaagttgaggtggtctgggagagatgctttcacatttggcactttttaagttggaattcttcacttcaacctgaggccatttaggagaggggttagtgttgtcatggagtctgggctgttgggatgagaaacttggtttcatccttgtgtagagtagggggcagatttccatgcccttgcccaaggtgagggcggagttgtggtgctggtaaggggaccctgyccttctgagaggggyatgagaaacagtagtgctgcctaaacattctgggttccacgtcttggcctcccattggccacttgggctggggctgcctttcatgttgaccgggagctgcgcaggagctgtgaactctgtcctgagctgtagcatgacccactttttccacttgccacaccccattcctgtccctttcctaaatcttctctatatctcagtaagtttgcggtttgccatttcagcatattatttgcctgagaagtttggggggctccatgtgcatggaaggatgtcccctttgcctccatgggttgtctttgtctccacttccagcttttatgggggtggtgagatgtagctgatgggggttgggggttgacttggggattggtggggaaaagtccttaagaaaatgattctttctggtgaaatccaggctgatgttgcattcccaagggggaatgggaggggcgttcttgtgcctggtcttattctgggctgagaagcagggaggctgatggtgctttgtccagcctaatgtctcattccctagtatctgtctagctcaggaagtggggagccagagacattttagggctaattttgggggttaagagctaagaacatgtcagggattgaaggagggatattattttctyttttatttttgagatggggtctcactctgtcgccaaggttggagtgcagtgtgcgatcttggctcactgcaacctccgcctcccgggctcaagcgattctcctgcctcagcctcctgagtagctgggattacaggcacccaccaccatgcctggctaatttttgtttttttagtagagacagggtttcaccatgttggccaagctggtttcgaactgacctcaaatgatctgcccgcctcagcctcccagagtgctgcgattacaggcatgagccattgcacccgattgggatattctcttctaccactgtctaggtcctgctctgtttttttgtgcagacattcccatatgttggataggaatctgggtgggagtggtgaggaagctgagcttcagagacttcttgtgggcctccattcctcaaactaaatcttttgggtatcagaaatttggggagaaggttgtatgcgctgaccacaagtccactgagcctttgttaaatctcagctctgatgattgaaaaaataattatgattgagggagtgatcgagttcttctcttagtattaccttcatgtttgtctcgctttccttgggtttccttgcttaggatgttagggtgggctcttgtgaactgttgtcatcccagagtaggtggcatttggacctggggccaggtaatttggggaggcttctatgagggcagtctccccccccgccaccccacctctctcaaacccaccccctcccctgccacttcctgtctgtcctatgttggcagctgggtgccctgggctggcttctgcggtcaggagccattttccctctcctcagtgggtgaggcactcccttcttctctccactcctttctctacccacccccctttgggcgggggtggcttgggaagagggagagaggagggaggagggagtcggagccagtgtgaatgtctgttacaaaggaagctgcctcctggtcttctctgtgtcccttcccacctatccttgcccaggagctttcagtcttacccaggctttgtgtgtgcctccagccaggggaggaggtggagccagatgggaggaggcttgctggggggcgggtgtaggggagatggtgacagctgggctgattcgggcccctagggagaagaggctgctgacccaggagaagctgaggaggaacattagggttggagatggggaaaggaaattgtattttagaagtgggcatgagattgagctggcacctgaacctaggacttggaggttctggttaatttgagcagtgatgacttcaaagtggttagagaagggtgtggtttccgagacccctgaactgatcctgttctgggaaggtatattctatagtttttgccttctgagtaggatctttcattctcattccctggtttatagaataacttggtggccagttacaggaggcctaaatctagttctcttacttggtgaactctgagcagctcagttcagctgtactggtgaacatctagaggactggtaggaacgggagagaggaggcaggggtctggacagctgcccgaggtgggcctggtctggcctggcaggcctatttcgggtatatacagctctctctttgtctgtttttgtcctgggtatcagcttcctcctgtacagagtatagcagttctcttcagaggaatctgggacaagaggtggggaataaagtctaaagcctctggattagggcctaaccttttgctattgatcttttccctgcctaccactctttgccaaatatatgtagaaaatgaagaggacccagaagaggatttgtcagaaacagagactccaaagctcaagaagaagaaaaagcctaagaaacctcgggaccctaaaatccctaagagcaagcgccaaaaaaaggaggtgagtgggtgactgaatgttacggggaatcagaggaagaagggaggagctctgagaagggttgaagggctgagggcatttgtttctttctcagaagtggtgggccatgttctggggatgagcctcagggctgtcctgaggtcagcatgtgtgtagcatgtgtgtgtctgtctccctcttccccccttgccctgctccagcgtatgctcttatgccggcagctgggggacagctctggggaggggccagagtttgtggaggaggaggaagaggtggctctgcgctcagacagtgagggcagcgactatactcctggcaagaagaagaagaagaagcttggacctaagaaagagaagaagagcaaatccaagcggaaggaggaggaggaggaggakgatgatgatgatgattcaaaggtgcctggacctccatcctcttctttgtactgttaaacttttgtctttttgtttcctagacaccttactgccctttagaacactttctcttcttttcctcttaactctgttactctgatttttccacacaaatttgcttagcaagtgtgggcactaggtggcaggtacttacttgactttgctctttctgcaggagcctaaatcatctgctcagctcctggaagactggggcatggaagacattgaccacgtgttctcagaggaggattatcgaaccctcaccaactacaaggccttcagccagtttgtcaggtaaaacagaaggggtttggggaagggggaggagaatctttctgttctctcttcttacttctctttctttttttattcttaaacctttccctctgctcttgtgcatttctccaccagacccctcattgctgccaaaaatcccaagattgctgtctccaagatgatgatggttttgggtgcaaaatggcgggagttcagtaccaataaccccttcaaaggcagttctggggcatcagtggcagctgcggcagcagcagcggtagctgtggtggagagcatggtgacagccactgaggttgcaccaccacctccccctgtggaggtgcctatccgcaaggccaagaccaaggagggcaaaggtgaaatggggttcaaaygggagtgggggtgtctagtgtgggcttaagatgtcaaagacagcatgggaatgctggtctgtcagccctaaggtaggagataggagggaggaatgagtcttggattttggagggaaatttgggaatctgaatgtggggaagcaagcttaggtggagaagattttattttccccatctttggtcttgtggtatatatttggatatatcctgattttaggtcccaatgctcggaggaagcccaagggcagccctcgtgtacctgatgccaagaagcctaaacccaagaaagtagctcccctgaaaatcaagctgggaggttttggttccaagcgtaagagatcctcggtgagagcccagcccatcgctttagggagggtgccatgtctaatagaaaggatgtgaccttctatcagaacctgtccttcatagtaggcacgtaagaatgtggggcgtttcccacagaacaagatgagactaggctccctgtataayggtgcttgctgggattctggtgtccccagtgagagagtactcccctctctgccactctgtccttccccttggcttgaacgtctaaccttattctttttcatcctgccagagtgaggatgatgacttagatgtggaatctgacttcgatgatgccagtatcaatagctattctgtttctgatggttccaccagccgtagtagccgcagccgcaagaaactccgaaccactaaaaagaaaaagaaaggtgtgtttctcttctgtatatttgtgatgggatgaggtgggagtgattggggaagaatctccctaaggagataggggtcggggggtggggggaggtagtttttttccaataactgggctttccctcttccttgcccaggcgaggaggaggtgactgctgtggatggttatgagacagaccaccaggactattgcgaggtgtgccagcaaggcggtgagatcatcctgtgtgatacctgtccccgtgcttaccacatggtctgcctggatcccgacatggagaaggctcccgagggcaagtggagctgcccacactgcgtgagtgtctggccattgtggccccttggaacccatgagaagaagggtgggacagtaaagctcttcrgggcctggatggaaatggaaatgctggtgctgcgggttgtgagctttgggaagcattcaaaggaatgatgggcactggcttcagactgcggtgggcgggtgggggtaataatctgaatctgtggtcctttactgcaggagaaggaaggcatccagtgggaagctaaagaggacaattcggagggtgaggagatcctggaagaggttgggggagacctcgaagaggaggatgaccaccatatggaattctgtcgggtytgcaaggatggtggggaactgctctgctgtgatacctgtccttcttcctaccacatccactgcctgaatcccccacttccagagatccccaacggtgaatggctctgtccccgttgtacggtgagtgactgatctcagccggggcaaaaaatgggaaagtrtagtcttttctatgtaggctattgtgaggctggggtgcaggagaggaactatgagcttttcagccctgagaaaggtattctccttcatcctatagtgttgggatacttttgtcctgggaaaatataggactaacttcaaactgaggagttgatgttttgccagctctcttaagaggagatgaagcaatgttcttctagctgagaacatttgtccctgtgttgacaccctgcctcagggtcttggtagcttacaatgttttcaatttttttgttaaaaaaatttttttttttggagacagggtctcattctgtcatccgggctagagtgcagtggtgcagtcatagctcattgcagcctccaactcttgggctcaagtgatcctcctatctcaacctcttgctgagtagctaggagtactggtgcatgccaccacatccagctaattaaaaaaaaaaaatctctgttgagacagggtctcactatgttgcccaggctggtcttgaattcctggtctgaaaccattctgctcccttgtcctcattaagtgctggcattacaggtgtttaccaccatgccagccagtttagaatgtttaatagggccacttactgctttagattgcttaagggaggaattctgtgctctaagtctgttgatttcctgattgttctggcttattgttaaagtctaactactggctctgttaagcagataggagtgatggtggcacgcaaatcctggacgatgtccagaaatggagagggaattctattacaggttgagcaccctaatccaaaaatgtgaaatccaaaatacttctggtcccaagcatttcacatgaggggtcctcaacctgtattttctccctggaggagtcctgggattagattttatttgaaatgagatctttttttatttttttgagatggagtcttgctctgtcccccaggctggagtgcagtggggcaatcttggctcactgcaagctctgcctcccaggttcaagtgattctcctgcctcagactcccaagtagctgggactacaggcgcatgccaccacgcccagctaatttttgtatttttagtagagacggggtttcaccatgttagctaggatggtctcgatctcttgacctcgtgatctgcccgcctcggcctcccaaggtgctgggatttcaggcatgagccactgctccaggtctgaaatgagatctgaatcgtcctttgatgaagttgagactgtgggctgtcccttctcctcccatggttatgatttgagattaagttgtctctttttctctcagtgtccagctctgaagggcaaagtgcagaagatcctaatctggaagtggggtcagccaccatctcccacaccagtgcctcggcctccagatgctgatcccaacacgccctccccaaagcccttggaggggcggccagagcggcagttctttgtgaaatggcaaggcatgtcttactggcactgctcctgggtttctgaactgcaggtragtttaggatagtctggagatgtaggggctacgatgaagaggatagtgacaaaagagccttgtggatagaaggaatgaacacagcttcttggtggctgattttctctttccgctcaaagctggagctgcactgtcaggtgatgttccgaaactatcagcggaagaatgatatggatgagccaccttctggggactttggtggtgatgaagagaaaagccgaaagcgaaagaacaaggaccctaaatttgcagagatggaggaacgcttctatcgctatgggataaaacccgagtggatgatgatccaccgaatcctcaaccacaggtaccagctgagcacacgggagacgggcagtctccgtgggagagtcctgctaaagagattgggaaaatggctgtcaccagtaacttagacttggaagacactggttttttttgtttgttttttgtttttgagacagagtctcactctgtgcccaggctggagtgcagtggcgtgatctcggctcactgcaacctctgcctcccagattcaagtgattatcctgcctcagcctcctgagaagctgggactacaggcgcaagccaccatgcccagctaattttttgtatttttagtagagacagggttttcattctgctggccaggctggtcttgaactcctgacctcaggtgatctgcctgccttggcctccctaagtgctaggattaacaggcgtgagccaccacgctcagccttatatatttattttgagacaaattttagctgtgttgcccaggcttgagtgcagtgtcgtgatcactgctcatagctgtcccaaactcctgggctcaagcaatctgtctgcttcagcttcccaaagtgttaggattacaggcgtgagctactgcgcctgacacttcatgttattatctttatttatttattttattattattgtttttttttgagacagacttgtcacccaggctggagtgcagtggcgtgatcttggctcactgcaagctctgcctcctgggttcacgccattttcctgcctcagcctcccgagtagctgggactacaggccatcgccaccatgcctggctaatttttttttttttgtatttttagtagagacgggatttcactgtgttagccaggatggtcttgatcgcctgaccttgtgatccgctcacctcctccttccaaagtgctgggattacaggcgtgagccgccgcactcggcctatttatttatttatttattatattttttgagacagagtcttgctctgtggcccagcctggagtgcagtggtatgatctaagctcactgcaacctccgcctctcaggctcaagtgattctctgcctcagcctccagagtagctgggattacaggcgtgtgccaccacgcctgcctaatttttttttttgaaatggagtctcgttctgtcgcccaggctggagtgcagtggcgcaatctcagcttgctgcaacctccgccgcccgggttcaagcaattctcctgcttcagcttcccgagtagctgggattacaggcacctgccaccatgcccggctaatttttgcatttttagtagagacggggtttctccatgctggccagactggtcttgaactcccgacctcaggtgatccgcctgccttggcctcccaaagtgctgggattataggcgtgagccaccgcgcccggcctgatgcctggctaatttttttttttttttttagtagagacgggtttcgccatgttggcctggctggtcttgagctcctggcctcaagcgatctgcctgcctcagcttcccaaagtgctgggattacaggcgtgagccactgcacccggccaacactctatgttaattattaactgactgaattctggtgtttgagctctaggaaagtataaattagagataatttttggtcagagactggtacagtagaggctctgaaaacgtgtgatctgtggcatacctagaggtctggtgtgaaacaaacggtattgccagtttttgagaggaagtgaggagggttgccttttctggctctgagggttttctctcctggacttgcagtgtggacaagaagggccacgtccactacttgatcaagtggcgggacttaccttacgatcaggcttcttgggagagtgaggatgtggagatccaggattacgacctgttcaagcagagctattggaatcacaggtgagtgattttgggtgaggcatagagttgtttctttttttttttttttgagatggagtcttgctctgtcaccaagctgtagtgcagtggcgtgatcttgactcactgcaacctccgacttcctggttcaaacgattctcctgccttagcctcctgagtagctgggattatttgcatacgccaccacacctagctgattttttttttttttttttttgagacgaagtcttgctcttgtcccccaggctggagtgcaatggtgcgatcttggctcgctgcagcctccgcctcctgggttcaagcaattctcctgcctcagtctcccgagtagctgagattacaggcgtctgccaccatgcccagctaatttttgtatttttagtagagacggggtttcaccatgttgaccaggctggtctcgatctcctgacctcaggtgatccgcccgtctcagcctcccaaagtgctggcctcccaaaatgctgggattacaggtgtgagccactgtgcctggccaagttgtttcttctatagaaaaggattttgggcagctgtgtgatgtctttcttctttagggagttaatgaggggtgaggaaggccgaccaggcaagaagctcaagaaggtgaagcttcggaagttggagaggcctccagaaacgccaacagttgatgtgagtgggggtggaagggactgtagtttgttgggtaggacaatgtatctttgctgcagtctaatgatggtactcttaagtaatgaaatgcagatagtaactttgtagctgagattacttcacaaagtcggcttccccacttctccacatctctatatatcagaaagcactaggattactttcttcttttgtcatcagaaaaaaaaaaaggaggtatattttgaatgattgaagaagtgttgtctggggggaggggccacatagcctagcttttatgcacttacatwggaatctggcttaattcaggctcagttcctctgggttttgtttgtacagtgtaatttgagggtgattaaagttaaaaagatgaatctaagagggacataacgattatttacctggtggatcctgactagtagaattattgtattggtagggagtctgtgacgtgcttttcctcagtgatctgtaggatcaaaatcaggtctggttaagccctgtttcctggaggaccctaaactgaacatgaaattgcagtaatcataggggatctcttccctccgaattttccggagctcttccccaagaggatccgtgaagactagtgaggaggaagcagctgctctattaggggaggaggggagttccttgccagctcttgacttctctgtttcatccttcagccaacagtgaagtatgagcgacagccagagtacctggatgctacaggtggaaccctgcacccctatcaaatggagggcctgaattggttgcgcttctcctgggctcagggcactgacaccatcttggctgatgagatgggccttgggaaaactgtacagacagcagtcttcctgtattccctttacaaggaggtaaggaaatctggggtggatagttttttgtgtgggtgttttgtgtttgaagccttaacttacactgagtagagagakaagggaataaaaaaattggtctctgaccttcaagaacactgtggataatagataaacacatgtacacatgtgtttagtagatagtagataaatgtgatagtggataaacacatgtacacagcggaagatttgagggcatggagccctgggtaggattagcagtggatccatagagtatcagttctaggggaatgattgtgtgttgagggaagtagaattatgagtagaattagtatggaaaggcttggctggacgcagtggctcatacctgtaatcccagcactttggaagcccgaggttggtggatcacctgaggtcaggagttcgagaccagcctgaccaacatggcgaaaccccgtctctactaaaaatacaaaattagccggatgtggtggtgcacgcctgtaatcccagctacttgggaggctgaggcaggagaatcgcttgaacccgggaggtggaggttgcagtgagctgagattgcgccattgcactccagcctgggcaacaagagtgaaactccgtctcagaaaaaaagtatataaagacttaatgggagaggtaagacttgtagttatggtgggaccttgggtttttggaaaggagtgggctgggcacttgtatagaggaaggtgagagcaggagcagcagcgcaggtgtgtcagtccttggctcagcttgagggggcagcagggtggtgggtgttcgctggggttgcagtgtgctggggccctcagtcctgactctcctcttttttctcaaagggtcattccaaaggccccttcctagtgagcgcccctctttctaccatcatcaactgggagcgggagtttgaaatgtgggctccagacatgtatgtcgtaacctatgtgggtgacaaggacagccgtgccatcatccgagagaatgagttctcctttgaagacaatgccattcgtggtggcaagaaggcctcccgcatgaaggtatctcaggggagggaagccaycctagagaaagagttgtggcttctggcttagtttacctccttgtgatctggtccctgrtgaggcaaaagggtaaccctgggaggaggaaaacattccatcagtctcctggttgtgcttacacagaggaactgactagtagtgaccaagttgccttcatgtgcagaaagaggcatctgtgaaattccatgtgctgctgacatcctatgaattgatcaccattgacatggctattttgggctctattgattgggcctgcctcatcgtggatgaagcccatcggctgaagaacaatcagtctaaggtgagggctgagggagggatgttggagcccccactttgggttttttctagtactaccaattcattaaggggaaaacttgtagatggagaggagaggggaaaattgtctctgccttccttccttgtatgtgacagcccttggtggccaggcctttaaaaagaatgtgaggagtgggatgcttaactattgggcagtgaaaaacttgaaattttgtagagatttgctagagctctgttttcattggatttcacctttctccatctgcttcaccagttcttccgggtattgaatggttactcactccagcacaagctgttgctgactgggacaccattacaaaacaatctggaagagttgtttcatctgctcaactttctcacccccgagaggttccagtaagtatgtgtttatctgtaatcggctcataattgtgcctctcattcttcctgttgcccatttcctgtatcacttttctttcttcctttctccttctccaataacttttttcctttttctttctgaagcaatttggaaggttttttggaggagtttgctgacattgccaaggaggaccagataaaaaaactgcatgacatgctggggccgcacatgttgcggcggctcaaagccgatgtgttcaagaacatgccctccaagacagaactaattgtgcgtgtggagctgagccctatgcagaagtgagttgggagggacagaagcagactccatttagacatctgccagtctgcagagtgtttcctattcctcccccactcagcttcaaggcatctggtgacaggagcaagcaaggcctgaagaaacctgatgctagggcgctggagcgcatagttcttacttattttaggttatacctttccttatttaaaatggtggtggtggtagtgcttgtgcgttaggtgtccttagttccaaagtgggatgtgttggaagaaagatctcagttgttggcactgcattattagtcattgaaaggctctcaagtctaacctgtctttctaccttgcccatgtaggaaatactacaagtacatcctcactcgaaattttgaagcactcaatgcccgaggtggtggcaaccaggtgtctctgctgaatgtggtgatggatcttaagaagtgctgcaaccatccatacctcttccctgtggctgcaatggtatgtagtgccatctcctgttcctccctgggttgggtcttctccatgtgggctttcttttaatacttttttctttgcatttgttctcaggaagctcctaagatgcctaatggcatgtatgatggcagtgccctaatcagagcatctgggaaattattgctgctgcagaaaatgctcaagaaccttaaggagggtgggcatcgtgtactcatcttttcccaggtatcatgtggactgggagctttagggaacagtcatagacaacccttagtgacctaaggaaagggattaccatctgactcttccataattaaaccgtgcttcttttgcagatgaccaagatgctagacctgctagaggatttcttggaacatgaaggttataaatacgaacgcatcgatggtggaatcactgggaacatgcggcaagaggccattgaccgcttcaatggtgagagagaaggagttgtttagtttyaggaatcctcatttgcttatatctttggactgtaacttcttgtgcatctccttttctgtgtagttcttttgggactttgtcatttgagatggagtaaagcttttgaatgtctcaattggacgaatgtattggactattcctagragattttttcttttggggtatttgttctttctgctagaaagaagaaagcattgtatctcgagggcaagcaaagggtcaggacttgttcaagctcaaatagcaagttactagcagacttgtctgcctcagtagacgctactaggtttttttttttttttttttttttttttttgagatggagtcttgctctgtcgcccaggctggagtgcagcggcacgatcttggctcactgcaacctccgcctcccgggttcaagcagttctcctgcctcagcctcccaagtagctgggacaacaggcgtgtgccaccacgccyagctaatttttgtatttttagtagagatgtggtttcaccatgttggccaagatggtctcgatctcctgacctcatgatccgcccacctcggcctcccaaagtgctgggattacaggcacgagccaccacgcccagcctgttttgttttgtttattcgagatagggtctcactctgttgccgaggctggagagcagtggcacaatcatggcttactacagcctggacacacccccaggctcaagtgatcctgctgcttcagcctcccaactagctggggctrtaggcttgatccactgtacctagctaactaaaaaaatttttttgtagagatggggtcttgccatgttgcccaggctgatcacaaagttctgggctcaagcaatcctcctgccttggcctcccaaagtattgagattataggcataagccactgtgctcagtatcactactccttgtttaaaaaaaaaaaactttttattttaattttagayttagaaaaaagttgcaaaacagcagagagagttcatgtatactgttcaactagctagcttctcttaataataacttacgtaactgcagtacaatgatcaaaactagraaattaacattggtattgtactataaatgacagaacttcaatgaatgtcaccaatttttcttgatgtctgttttctgtttcaggatccaatcccaggtcccgtgttccatttagttattgtgcttcctgctatctgtgacatttctttattttcttatatgatacagattttttttcttcttcgggatggagtctcactctgttgcccagattggagtgcagtggcgcgatcttgactcattgcaacctatgcctcctgggttcaagcaatactcctgtctcagcctcctgagtagctgagattacgggtgtgtgccaccacgggcccagatttttgtatttttagtagagacagggtttcaccatgttggccaggctggtctcgaactcctgacctcaggtgatccgcccgccttggcctcccaaagtgctgggattacaggtgtgagccactgtgcctggtcaatatagatacttttgataagcactgttcagttattttgtagaatgtctcttaagtttgggtttgtgtgatgttttctcttgattagattagacattctgggcaagaatgccacagaggtgatgatgtgtccttttcttttttttttttttgagacaaagtcttgctctgtcaccaggctggagtgcagtggcctgattttggctgactgcaacctctgcctcccgggttcaagccattctgctgcctcagcctcccgagtagctgggattacaggcacccgccaccacgcccggctaatttttgtactgttagtagagacagggtttcaccatgttggccaggatggtctcgatctcctgaccttgtgaaccacccgcctcagcttcccaaagtgctgggattacaggcgtgagccaccacgcccagtcgatgatgtgtccttttcagttcatcatactgggggacggacatgatgttcatatgtccccttactggtaatgacttgatcactggttaaggtggtgcctgctgagtttctgcagtgtaaagtttctattgttcccattgtgattgataaatagcttgagggagatatttgagactatgtcagtgtcctgtttctccttaaactttcacaccgatattagtattcgtcagtggaccttgattacaatgattattactgtggtgtttgcctaatgaggttttatattctgacattctttcttttttacttctgcctcccgggttcaagctattctcttgcctcagcctcccgagtagctgggattacaggtgcctgccaccacacctggctaattttgtatttttagtaggcagggtttcaccacgttggccagcttagtctcgaactcctgaccacaggtgatctgcccacctcagcctcgcaaagtgttggggttacaggtgtgagtcactgcacctggcctattctgacatttttctataagagttagggtcttgctctgttgcccaggctggagtgcagtagcacagtcagagctcattataaccttgaactcttgggctcaagtgattctcctgcctcagcttcctgagtagctgggactacaggcgtgtgccaccattcccagctaaatttttttttttttttgagatggagtttcttgctctgttgcccaggctaaagtgcagtggtgcaatctctgctcactgcaacctctgcctaccaggttcaagcggttctcctgcctcagtctcctgagtagctgggattacaggtgtataccaccacgcctggctaatttttgtatttttagtagagacagggtttcaccgtgttggccaggctggtctcgaactcctgatgtcaaatgatccacctgtctctgcctcccaaagtgctgagattacaggcatgagccactgcccccggcttaattttttaaactacatttatgaattggaatttaggagacacttctaatggtgtttttggttcttttattagcaccgggtgctcagcagttctgcttcttgctttccactcgagctgggggccttggaatcaatctggccactgctgacacagttattatctatgactctgactggaacccccataatgacattcaggtgagcagaggcagcaggcagccttaataagtaacatgttatgctagaaaggcatagtggcctctatgagggctccaccatctggaattaggtttttaagtgagaaacaacagattctttttgtgttgtttaccttattgtaagccagagtttggttagctgtgatcctattttgggtaacatgataatagagggtggtgtctggaggcaggggtgcaaaaggaagtttcctatgaatgtaggctgtggaccttgccttgtactgaatttagaatattatgtggaagtcaggataagagtggcaccaggaaaatacaatttctggctttatttcctgttcaactccaggcctttagcagagctcaccggattgggcaaaataaaaaggtaatgatctaccggtttgtgacccgtgcgtcagtggaggagcgcatcacgcaggtggcaaagaagaaaatgatgctgacgcatctagtggtgcggcctgggctgggctccaagactggatctatgtccaaacaggagcttgatgatatcctcaaatttggcactgaggaactattcaaggatgaagccactgatggaggtgaggtagtcaggaacttacrttttggtgtggggcttggcctctctaaaggttagggagaatctttgataccaagggtcttgtgggacttgctttttccactgcagctgctgaaactgactttggggatgtgggcccttgattttttataggaggagacaacaaagagggagaagatagcagtgttatccactacgatgataaggccattgaacggctgctagaccgtaaccaggatgagactgaagacacagaattgcagggcatgaatgaatatttgagctcattcaaagtggcccagtatgtggtacgggaagaagaaatgggggtgagtatgaatccaaggcaatcctgtgcttggtaattggtctgaaaattggcattgagaccaaggtggtatttgagacaagtggaaaatatctgtaggcaaattcttatgttgatgaattgatcctcttcctttgaaaacaaagctgataacatgactaatcagattttcatctttgccttggttgtcagaaaacttacaaccaaatatcatgctcacaacagttattttggctctttaccagaatgtcattttctcctatgtgttttattaaaccttacaaatgaaattttgaatgctacctcatctctctagagaaaaggcagaagatcctaggtaatctatctctttgtgttttctggtttttatttaagagacagggtctctaccaggtgcagtggctcacatctgtaatcccagcactttgggaggccgaggcaggcagatcacttgaggccaggagtttgagaccagcccggccaacacggtgaaaccccgtttctactaaaaataaaaaaattagccaggcacgatgaagcacacctgtagtcccaggtgttcgggaggctgaggcaggagaattgcttgaacccaggaggcggaggttgcaatgagctgagattgcgccactgcattccagcctgatgacagagccagactgtgtttgaaaaaaaaaaacaacaaaaaaagagacagggtcttgctctgtcacccaggctagagtgcagtggcacaatcatagctgagtgcaaccttaaactcttgggctgaagagtgaccctagtagatgtgtgctaccacacctggttaattttttaaatgtttttagagatgtcttgctatgttgcccaggatggtcttgaactcctggccttaagcagttctcctgccttgacctcccaaagtgctggaattacaggtgttagccaccacaccaggcctccttgtgtatgtatgtatgtatgtatttatttatttattttgagatggaatctcactctctcccccaggctggagtgcagtggtgcgatcttggctcactgcaagctctgcctcccgggttcatgccattcttctgcctcagcctcccgagtagctggggactacaggtgcctgcctccacacccagctaattttttttgtatttttagtagagatggggtttcactgtgttagccaggatggtctcgatctcctgaccttgtgatccacccacctctgcctcccaaagtgctgggattacaggcgtgagccactgcccctggccttatatattttttttttgatacggagtcttgctctgttgcccaggctggagttcagtggtgcgatcacagcctactgcaacctccacttcctgggttcaagcaattctcctgcctcagcctcccaagtagctgagattacaggtatgcaccaccatgcccggctaatttttttatagttttagtagaaacggggtttcaccatgttggccaggatactctagaactcctgacctcaagtgatccgcctgcctcggcctcccaaagtggtgggattacaggcatgagccattacgcctggcctctttgtgtgtgtgtttttttttttttgagacagagtcttgctttcccgcccaggctggagtgcagtggcatgatctcggctcactgcaacctccgcctcccgggttcaagcagttctcttgcctcagcctcccgaatagctgggactacaggcacgtgccaccacacccagctaattttttgtatttttagtagagatggggtttcaccatgtttttttaaagattagaattgggccagacgtggtggctcacgcctgtaatcccagcactttgggaggccaaggcgggtggatcacgaggtcaagagatcgagcccatcctggctaacacgatgaaaccccgtctctactaaaaatacaaaaattagctgggcgtggtggcgggcgcctgtagtcccagctattcgggaggctgaggcagagaatcacttgtacctgggaggcagagcttgcagtgagccaagattgccccactgcactccagcctgggggacagagccagactccgtctcaaaaagattagaatcggtatatacctttttattctcctcccttctttttcttggtcttttatagtaaaaaaaatagtatgtgaggaatgtgtgtgtggcttgttttaatgtttttctctcctaaatgatatagaggggtatgaaatggaaaaataaaatttcctttttcttgtcctctgtaaaccactcagctccgggttctttcagttggcattggttctggtggtctttgtcatcttttctcattcttccacctcagaaccatcccccttgctgtgtttccctgatgcttacctgtgattttgttctcgaaggtaatgcgtccaacctcagtttatatgtaagtgtggctgaatggtctgacataggtctgtgtaccgtagtgttcaatcagaaacgaccctattgatagaatgctcacattcctttcagtggcagtgaatgtaatagaagtgattgatgggagagcacatgctaagtggatcatccttgctggtgactacataagtatacaaattgttctttgattagtgactatagctgctgttgacttcttttaaaatatttttaagttttatttttaatagatagaatttacatagttcaaaatacacaaaagggccagacacggtggctcatgcctagaatcccagtactttgggaggctgaggcaggagggtcgtttgagcccaggagttggagaccaacttgggcaacatggtaaaattccgtctctaaataataaaaacattagcygagtgtggttgctcacgcttgtggtcccagctgcgtgggaggattgcttaaacttggcagtcgaggctgcagtgagccgtaatgacgccactctactccagcctgggcaacacagctagaccctctctcaaaaaaatatatatatatttatatgtacacacacgtatctcttttctctcctgtcctctaacaatttagttcccttcttggggacaactaatgttttcagttccttttatatctttccaaaaatattttatgtgtatacaaattatacatatattcatacacatatatgtacactcacatatatgtacccaaagacttttttttccttgtaaacataaaagtaataccaatgcaatgtaaatgctacattggttagggaataatgacaagaaaaaagtctgtaaatgttgagtacagacataattttgttttttctctgaatattttccatctatggttgtttgaatccacaggtgcggaacccgtggatacagagggccgattgtaatttatttaattagttccataatgatgggcttttaggttgtttctaatgttatgctattagcagctgtttaattccaatataagggatgtggaatcagtgagtggtcctcaagtgtctgaaaaaaattcacttttagaggagtatcaacgtttttgggacataagaggctatatagaattcttttcgttctgcagacagttggtaagcttttatgaagtttatgaagaatagaaaggcttatagtcatcctctccttccttctctcttatgaaaatcttttacagtacttcagaagtttctccattctgccttgctaaggctctgacctcttttctttttgctatctttcaattgtatatgcatcagtgcaaggggttagaagaaagcattctgtctcttcatccttacctgtgataatagctctatcccatgtttttcttgagttatgctgactgctaatctatatgtaattatgaggagctgtgtactctcaatcaaatttcttctaagttcttaggtccaaacaggcacaccaagtatttaagagtccagtcatgaaaaggagctagcagagtgggaactgtgaggaccaggggtagctggtggtgctgacttcagcactcctgagtcctggccctccctctgtcccaggaggaagaggaggtagaacgggaaatcattaaacaggaagaaagtgtggatcctgactactgggagaaattgctgcggcaccattatgagcagcagcaagaagatctagcccgaaatctgggcaaaggaaaaagaatccgtaaacaggtcaactacaatgatggctcccaggaggaccgaggtgtgtgtggccggccccgccccccacccatgggccgttccactagagcagtgggccccgctcatctgccctctctccctccagattggcaggacgaccagtccgacaaccagtccgattactcagtggcttcagaggaaggtgatgaagactttgatgaacgttcagaaggtgagggctgtgctttttttgttgcttttctaaatgttgctttgtttaatatcctacctgtgtcactcattcatctttttcttcttgcagctccccgtaggcccagtcgtaagggcctgcggaatgataaagataagccattgcctcctctgttggcccgtgttggtgggaatattgaagtaagtgccatacgattctaaggaggggtgagtgtcagatattgcatctttggtggaatgcgacctgctgcctctcacctgggtttcttcttcccctaggtacttggttttaatgctcgtcagcgaaaagcctttcttaatgcaattatgcgatatggtatgccacctcaggatgcttttactacccagtggcttgtaagagacctgcgaggcaaatcagagaaagagttcaagtgagttgagggctggagtggactgatctagagcaagggcttctgctatctatctggtcattccatggttctaggcctagccgtgcagggaagtgggctattttctctgttgaagttggcaggtgaagctgttagtaatgtgttcctagcttccctggaagagaacctgggtcttcttgtggggtctagagatcagccttcccgtgcagtggtgggctttayctcaaggtggagccatagttattgcctgtgataatgcctcacgaagggatggaaaagaatctaagagtcagcatgatccctatttaactctttctctacttctttacacagggcatatgtctctcttttcatgcggcatttatgtgagccgggggcagatggggctgagacctttgctgatggtgtcccccgagaaggcctgtctcgccagcatgtccttactagaattggtgttatgtctttgattcgcaagaaggtgagccctgagcctcttgccattgtttctagggggccaggcgcagtggctcacacctgtaatcccagcactttgggaggctgaggcgggtggatcacttgaggtcaggagttagagactagcctggtcaacatggcgaaaccccatctctaytaaaaatacaaaaattagctgcacgtggtggcgggcacctgtattcccagctactcagaaggctgaggcaggagaattgcttgaacccgggaggcggagactggaaggccaataggaaaggagcctgtagctggaattgggtcttcaacttcttgtcccattgctacaggttcaggagtttgaacatgttaatgggcgctggagcatgcctgaactggctgaggtggaggaaaacaagaaratgtcccagccagggtcaccctccccaaaaactcctacaccctccactccaggggacacgcagcccaacactcctgcacctgtcccacctgctggtaagtctgcctgtcctatcattttctgtccctctctttttgtcctggcctatttttctgctcccctgtgctcagttctaacagggtagtctggcaggacacacagcaattccctctcagtttaggagggccgtcctaagaatagggctggctcttaaaggyacgagaggacaatttaagatgagacaaactgggaagaaatgaccttctctctgatctagtaccttcttcctaattgattgtcttttattgttctgcagaagatgggataaaaatagaggaaaatagcctcaaagaagaagagagcatagaaggagaaaaggaggttaaatctacagcccctgagactgccattgaggtaagagatggggtgactgaatgccatactaaagacaaatgtgtaagtccagtcttccttttagttgctggcctgtctgcttcatctgttttgtttttgtttttttttcctttgaagtgtacacaggcccctgcccctgcctcagaggatgaaaaggtcgttgttgaaccccctgagggagaggagaaagtggaaaaggcagaggtgaaggagagaacagaggaacctatggagacagagcccaaaggtaaaggtatccacattttttttktttgtttgtttgttttgagacagtgtagtgctgccgccaggctggagtgctgtggcgcgatcttggcttactgcaacctccacctcccaggttcgagcgattctcctgcctcaccctcccgaggagctgggattacagacagacgccatcatgcccagctaatttttgtatttttagtagagacagggtttcaccatgttggccaggctggtctaaatctcctgacctcatgatccacctgcttttgcctcccagattgctgggattacaggcatgagccactgtgcctggctttttttttttttttttttttttcaaaggagttttactcgttgcccaggctggagtgcaatggtgcgatctcggcttactgcaacctccgcctcctgagttcaagcgattctcctgcctcagcctcctgagtagctgggattacaggcatgtaccaccatgctcagctaattttgtattttttagtagagagggggtttctccatattggtcaggccagtctccaactcctaacctcaggtgatccacctgccttggcctctcaaggtgctgggattacaggcgtgagctaccatgcctggccggtatccatattaagcactacagatccctgtgtgaaccatggtcactcgtgaatttttgctggggctgtagagatatcaggaggaagcgacacactgaagaatcctgcacccttgattttaggtggcaggttttcccctaacttaaggtatctcttatgactttatttgttgttgttgttgttgttgttgttgttttcgagatggagtctcactctgtcacccaggcaggagtgcagtggcacgatctctgctcactgcaactcccgcctcctgggttcaagcgattctcctgcctcagcctctgagtagctgggattgcaggcgtgccacaaccatgcccacgtaattttttttttttttttttttttgagacggagtctygctttgtcgcccaggcttgagtgcagtggcgccatctcggctcactgcaaactccgcctcccgggttcacaccattctcctgcctcagcctcctgagtagctgggactacaggcgcctgccaccatgcccggctaattttttgtatttttagtagagacggggtttcaccgtgttagctaggatggtctccacctcctgacctcgtgatccgcccgctttggcctcccaaagtgckgggattacaggcgtgagccaccacgcctggccaaaattttttttttttttttttttgagacggagtcttactctgtcacccaggctggagtgcagtggcacgatcttggctcactgcaacctccgcctcctgggttcaagtgattctcctgcctcagtctgctgagtagccaccatgcctggctaattgttttttttgttgttgttttttttttttttgagatggagtcttgctccgtcgcccaggctgatgtgcagtgcagtggtgtgatcttggctcactgcaacctccacctcctgggttcaaacaattctcctgcctcagcctcctgagtagctgggattacaggcatgcgccaccacgcccggctaatttttgtattttagtagagatggggtttcaccatgttggccaggctggtcatgaactcctgacctcaagagatccacccatctcggcctcccatagtgctgggattacaggtgtgagccaccacgcctggctaatttttgtacttttagtagagacagggtttcaccatgttggccaggctggtttctaactcctcacctcaggtgatccacccaccttggcctccccaagtgctgggattacaggcatgagccaccgcacccagctaatttttgtatttttaatagagattggggttcaccttgttggccaggctggtcttgaactcctgacctcaagtgatctgcctgctgctgtctcccaagatgctgggattacaggcatgagccaccatgcccagctgacattactgtaattgcagacatttagatgtgggtctatccaattggataatagtgtgcaacagaggagaatgttcttcctttaggtatagtctcaataacatttcttcccctaggtgctgctgatgtagagaaggtggaggaaaagtyagcaatagatctgacccctattgtggtagaagacaaaggtgggtgtttggagaagttgattgtggttcagaagaactctaaaaccagaagcaaggactgtatctgccctgcctccctgtccatactcatctagccattttatcccaagataaaagactgtacctgtccccacatttagttgtcagtgggccaatggcaccattttctgggtctgagagacacccaggtggagaaggggtgtaggtggatggattcttgtagcatacagtgttctgggtaagggcgatggtgctgggctttggctggagctgacatttttcttccccatattctgtagaagagaagaaagaagaagaagagaaaaaagaggtgatgcttcagaatggagagacccccaaggacctgaatgatgagaaacagaagaaaaatattaaacaacgtttcatgtttaacattgcagatggtggttttactggtatggaaatgaggggcccaccagggttagaaggatctgatgtgaaattggggttcttktcagaaaccacggtacagggactttacctctttacctctgtttgatgagggaatgccaaactgatagtgggttctgtggagaaagccagaagcaaattatatgaaatggatccaggggtaggggatggtgggggacaagaataagtagctttttcaattctcacagatgtttgcttccccccacccccaaccttccctaaattcctcctcagagttgcactccctttggcagaatgaagagcgggcagccacagttaccaagaagacttatgagatctggcatcgacggcatgactactggctgctagcyggcattataaagtatcctttgcctgaatctgtactgaggcttttggtgaaaggttctgaaggtcttttagtttgaggttcttactttccttgttttgtttttcctgagcacttttccaatagccatggctatgcccggtggcaagacatccagaatgacccacgctatgccatcctcaatgagcctttcaagggtgaaatgaaccgtggcaatttcttagagatcaagaataaatttctagctcgaaggtttaaggtgagcggttggggaggaatatattgcttaagtgacaaacttgaaagtgcgtaacgtcctgcagcagagggagtctgtccatccagcgcactgttctcactttcttcattctatggaaggctttgctcccaagtaacttacacattagggttgaagacacacagaattgaaagttaactaactgtacatgagctgtaggtgactatgtgtccaatcagtgacacactagtgcagaggggtttgtttggggaacactgcagattggagtattcaggaaagatatagaggtgggattgaattgcatctctgaagatgtagagctattagtcagtgggctgctggttgttttttttttttttttttttttgaggcagaatctctgtcgcccaggctggaatgcagtgatgcagcctctgctcactacaacctctgtgtcctgggtttaagtgattctcccgcctcagcctcctgagtagctgagattacaggcgcctgccaccacacccagctgttttttttggatttttagtagagatggggtttcaccatgttggctaggctggtctcaaactcctgacctcgaagtgatccacctgccttggccacccagattgctgggattataggcatgagccaccatgcctggcctggttcttttttctgggctaaaaagtgcctgtgtgggccaggtgcggtggctcacgcctgtaatcccagcactttgggaggctgatgcaggagaatcgcttgaagtcgggaggtagagatttcagtgagctgagatcgtgctacggcactccagcctgtgcaacagagtgagactctgtctcaaaaaaaaaaaaagacgtgtctgttgtctcgtacgctgagtataatcggggaagaaatggtacactaataagccttcaggtattatgtactaagcaatgatgtgcccagggataaaaagacaaagcatggtatctgttttcaaggagctttcagtttcaagtaggagcacatgtgtaatcaaatgaatgccattctgcatatcaggagagagattgctgattggcataagaaagttctccagaatmgcttgaacccgggaggcggaggttgcagtgagccgagatcgcaccactgcactccagtctggcgacagagcgagactcacctcaaaaaagacaagaaaagaaagttctcagagaggcagacacagtggctaatctcagcatttaaaagagctgattgcttgagtccaggagttcaagactagctcgggcaacatggcaaaaccccatgtctacaaaaaatacaaaaattagccagttctggtggcgtgcacctgtagttccagctacttaggaggctgcaatgagcctagattgtgccattgcactccagcctaggcattggagtgagaccctgttttgttttgttttttcctgagacagtgtcttgatgtgttgccaggctggagtgcagtggcaagatctctgctcactgcaacctctgcctcccgggttcaagcgattttcctgcctcagcctcccgagtagctgggacaacaggcgtgtgccaccacgcccagctaatttttgtatttttagtagagacagggtttcagcatgttggccaggatggtctcgatctcttgacctcatgttctgcccgcctcggactcccaaagtgctgagatwacaggcgtgagccactgtgcccatccaagaccctgtcttaaaaaaaaaaaaaagttctcgagagggaattggagtagggacggaactcacaaatggctttatggagaagatggcattggaatgaagttttgaagaatgcgacggaratttttttggtagaaacagaagggtatctgaacaaagggattaggttgggcaaagatgtgagccagcaaagcttagtatgtctggaaatagcagatagcccagttgagctgtagggaaacatttgtgttgggtgatggtgggaggtaggttggaacgagaaaggtggacgggctagaggtcagtaggtgggttcttggcaccagataagagagtttggactttacgctatcgttaatgggcagccactgaaagtttgtgagcagagttttgataggaccaagggaaatggaaacagcattcataagattataaaactgtcatataatcatgaggtgttaagggtctgggctgtgatgctggttgtggaaaatgaaaagggtaaagataaaggaaacaacaccaaagaatttattggacttagtgacttactgtaggggtcagcaaacctttttttctccccccaaaccaaaaacggttaataaaaccctttttttttttttttttttgagacaaagtcttactcagttgcccaggctggagtgcagtggcgacatttcctggctcactgcaccctctgcctcctggcttcaaccgattctcctgcctcagcctcctaagtaggtgggattacaggcatgtaccaccatgcctgactaatttttgtatttttagtagagatggggttttgccatattggccaggctggtctcaaattctggacctcaggtgatctgcccgccttgtcctcccaaagtgctgggattacaagtgtgagccactgcacccaaccacaccttttctattaaagggccagatagtccctttgtgggacatgtagtctctgttgcatatactcaactccatctttgttgtgtgaaagcagccacaggggatacataaatgaataagttaggatgtgtttcagcgtttcatctatggatattacaatttgaattttgtataattctcatgaagtggcatgaaatagtcttgttttgactttttgccaaccattttaaaatgtaaaacccattcttagctcttgagccatataaaaacaggtggtggggcagatctggcccacaggctgtagcttgccaactcctgacttactggatttgaggtacagaatgagtgagactgaaaataacattttgagcctgagtcactgagaaagttaaattgtcatttaagaagagagggagcagtttgtagaaaagaatgatatcgaattttagacaagtcttttggtatttctcacaaatcagcacccctcccactaccgacccccatcaccatacactagtgggatcagaaccagtgctgaaggtacatgtttgagaagcatcaaatcatctgcatagaactgctggctgacactaggagaggagaagggtatgagaaatcttctcttatgttgagtcatatgttttatgaatatattttttaagtaattaaaatcttttcataaattaagaaccaacattctgcctcttgggatatatttcaaagaatctttaatacagctccatcagatgacatgtgcatgagtgtttttgcagtatgatttttggtggtgggggcctagaggcaacataaatgttcagcattaggagaatgcataggtgaaacatgtattcatatcatggggcattaaacaacagaagcaacaaaattcatgtgcatacaacataagagtaccttttaaaaggtatgtagtgggagaagaaaaagcattttatagatacagaaaacatcattctgtaacttagaaacatacataggaaacagaaacagtttttaaaaacctacacaaaaagccacagtattactayattagaaaagttgcttttcagaggaatgggagtgagatggcgataagaggaaataaaaaacaaaaatatttttaaatagcaaaataacccctttttttttgagacagtttccctctgtcactcaggctggagtgtagtggcgcgatcctggctcactgcaacctttgcctcccgggttcaagcattcttctgcctcaacctcttgagtagctgcagttacaggtgcgcactaccatacctggctaatttttgtgtttttagtagagacggggttttgtcatgttggccaggctggtcttgaactcctgacctcaagtaatctgcccgcctcagcctcccaaagtgctgggattacaggtgtgagccaccgtgcccagccaaaacatgtttttgaagagtagttgataaagagtagatgataaaaaggaagatgcttaactgtgtaactaaatgaaaacataatatgggtatgtatatagtatgatctcagttatgtaaaaaactatgcacaaaaaaacctaaaaagaaaaatatcaggatgtatttctagaaggtgggattatctgttgttaaaaatttttgatattctattttctaaattgagtttttatcgcttttgtataagagaacctaaagggtaaagagttttaaaaatgaggacattgaaaaagggaaagaaaaaagttacaaggcaaagttaaactacttgggtgtgggaatgagctgtccatgaagttcttcataggttcttattaccatctgaaacaatgagaggtgagctgagaggccagtcagaagtgagtaaagtgagttatcagtcgaactcccgtttcctcttatcccttgtccagctcttagaacaagctctggtgattgaggaacagctgcgccgggctgcttacttgaacatgtcagaagacccttctcacccttccatggccctcaacacccgctttgctgaggtggagtgtttggcggaaagtcatcagcacctgtccaaggagtcaatggcaggaaacaagccagccaatgcagtcctgcacaaaggtagccagtggctcccctgcctcctgccgattcggcctccctgatctgactgcatcctaatgtacatatatttgttttcaaactttcagagctcctttgtctgggagtttaggaggtgctagggatctttgccatccttgggaggttagtatcttagaggcaatcaaggacagtagttctttgcctttttttttttttaaagagatggactcctggccgggcgcggtggctcacgcctctaatcccagcactttgggaggccaaggcaggtggatcacgaggtcaggagttcgagaccagcctggccaacatggtgaaaccccgtctctactaaaaatagaaaaattagctgggcatgtggcgcaacgcacgcttataatcctagctactcaggaggctgaggcaggagaatcgcttggaacccgggaggcggagtttgcagtgagccaagattgtgccattgcacaggctatcagcctgggcaacatagtgagactccagaaaaaaaagagatgggctctcaccattttgcccaggtgggtcttgaactcctggattcaagtgatcctccggcctcagcctcctgagtagctgggactacaaatatgtgccactgtacctggccacctcttttttttttttttttctgagatagagtctagctctgttgcccaggctggagtgcagtggtgtgatcttggcccaccacaacctctgcctcctgggttcaagcaattctcctgcctcagcctcccgagtagctgggactacaggcatgcgccaccacttgtggctaatttttgtatttttagtagagatggagtttcaccatgttggcaaggctggtctcaaactgacttcaagtgatccacccgcctccgcctcccaaagtgctgggattataggtgtgagccactgtgctccgccctggccaccttttttttttggaggtggaattttgctcttgttgcccaggctggggtgcaatggcgtgatctcggctcactgcaacctccgcctcctgtgttcaggtgattctcctgcctcagcctcctgagtagctgggactacaggcatgcccggctaattttgggtttttttgtttgttttttgagatggagttttgctcttgttgcccaggctggagagcaatggcgcgatctcagttcaccacaatctccgcctcccgggttcaagcgattctcctgcctcagcttcccaagttgctgggattacaggcgcctgccaccatgcccagctaattttttgtatttttagtagagatggggtttcaccatgttggccaggctggtcttgaactcctgatctcaggtgatccaccgcctctgcctcccaaagtgctgggattataggcatgagccactgcgccccagctaattttgtatttttagtagagatggggtttctccatgttggttagcctagtcttgtactcccgacctcaggtgacccgcctgccttggcctcccaaagtgctgggattacaggtgtgagccactgcacccggccacctcttttaactttaaacatattcaggttcttgagatggaaagcaaagcagaataatacagtgtcatttgcgatactttagaggtaacttcaggtgataaaagatcccttcaaattctagacccctttcaacattttgtttctaattaaagtaaaaggttatgaggaggcggagggtgaaataaggaaaagaatgctgttataatggaggtggggagacagattctgaaggtagagaagagaaaaaacgaataagctcaagaagaggaaatacaataatagtaagggatagtgaaggtttaggtgactttaaaaagcacaaaatcatggacagttggaactggaatatgaggagtaggaatttgaacatggtggaggtcaggtcagatgacagaagacaatacatcacagttacttggtcactgagaagtgatggggggctggtccactagggtagagggagctcagtctgggccaccacagctcaccacctctttttctccctatgcagttctgaaacagctggaagaactgctgagtgacatgaaagctgatgtgactcgactcccagctaccattgcccgaattcccccagttgctgtgaggttacagatgtcagagcgtaacattctcagccgcctggcaaaccgggcacccgaacctaccccacagcaggtaggaccattttcttcttgacaccacctcttcctgcagaaccattctggagcttgtaactttgctgtatgtccctagctttacatactgggtgggtggcctatcagtgaattcccttgagattgggtggattcctatcatctggaattctgactcctygggtctccttctctaggtagcccagcagcagtgaagatgcagactgataccacctccaccgctgagcagtgaccttcctcactttctcttgtcccagcttctcccctgggggcctgagagaccctcaccttcyttctgcccatcttccatgttgtaaaggaacagccccagtgcactgggggaggggagggagtgaggggcagtggtgcccttcctgcagaagagacatgcagcagtagcgctggcgccatctgcaggagctggcgggctggccttctggaccctggcttctccccactgtaacgcctgttacacacaaactgttgtgggttcctgccaggcttgaagaaaatgatctgaattttttcctccttttggttttattttgttggtttattttgtgttttyttttctcctttttggggggtattcagagtgggctgggcccctgggcgagacacagctacctctgttggcatctttttaataccaggaacccagcggctctagccactgagcggctaaatgaaataaagtggaaaaaaaaaaaaaggaaaaaaccaaaagcataaaaaaccmcagcaaatttcttgatgaaaattgaaaataaaagtttccttgtattttagtgctctggttcagtgtgggtgtaggtgcaggtggatgagtgtgtgcggcaggagcctggcacctgtatagttgaaaattaagggctacgtggtgtcctgataccccactgagtaactgggttctgtgtgtgggtgcagtatgtgccttgccaacgttgacttccacctgtggaaaatgagaggctgcaaaactgcgggcaccgccgcttaatggctctgtgaccttgagcaagttgtttaactttggtgggatgcagatatctcatgtatacctcatacggttgtcaagttaaaccagtgaagtacatggaacggttttaacacctaaccactaccttaatgttagtttctaggaaggctgaggggggttttcttgctaagttgtgcaaaattgggatgcaatttgtggaagaacacagcctcaatcccacacccccggaggcccgacctaacgtcctccaaccttgaaacccttgtagttcaccccttctcatgtcccagaccaggtcagccttgcaacccgttgtttcccaactaattgtagacccacctgaaagcgagttccggcgaagaggccccctgcgaatgaggtgcagtgcagcaccttaattgaggggctgagcaggggtcagcatcaaggaaggtgctgggagggcggggcacggtggctcacagcctgtaatctcagcacaaaggtgggggcaggaggatcgcttaagcccaggagttctagaccagccctggcaatatagtgagacgccaccccctacaacccgtctctataaaaagatttttaaaaaaggggcaaagaggaggaggtaagtggcatggaattccacggttttttttgtttgtttgttttgagatggagtctcgctttgttgccaggctggagtacagtggcgcgatctcagctcactgcaacctccccctcccgggttcaagcgattctcctgcctcagcctcccgagtagctgggactacacgcgtgcgccagccaccatgcccaactaatttttgtatttttaatagagacaaggttggccaagatggtctcggatttcttgacctcgtgatccgcccgcctcgacctcccaaagtgctgggattacaggcgtgagccaccgagcccggctggtttttttgttttttttttttgaggtggagtttcgctcttggtgaggcttaagtggcacgatctcggcttactgcaacctccgcctcccgggctcaagcaattctgcctcagcctctcgagtagctgggattataggcgcccgccaccacgcccggctaattttgtatttttagtagaagcagggtttcaccatattggccaggctggtctcgaactcctgacctcaagtgatccacccacctcagcctcccaaagtgctgggattacaggcgtgagccactgcgcccagcctggaattccgtgatcttgacgctggactagggcagtggatgcgagggagagggctccaatgtcgggccctggttcgaggagaaggtgcggctttcacccaacagaaaccggccgtgaggctaaaagccaactccatgagggaaggtcggtcaagctcaatggtttcgtcacattgctccctccacccgccgcgggtgtaagctgcgcktctccttcgaattgccccctactcgccgccgccggctccgctggcgttcccagggcgagcgtaagttccgggtgcggcggccgactaggcgcaacaggaagaggcggggccgcgaggctagcgctacccgtgcgcctgcgtggaacgattctgtggcgagtgccggccgaaagctaggtccggattgcacgtggagggccgcccgaagggcactctcggacattaacycgcattctggtgggtctagaggaaattgggggacgaagagtggcagcactgacctggtctgggacgtggggagaagggtgcgctacctgggtttcaggtgggagggcgttcggtcgggcctccagggggatagcgggggtgcttgagtcgcgggtgctgagtcgggagtgctgagtgagttgcgggtgctgagttgaggctgtgccctttcccactataatacgccaagcgtgcgttctgccgttccctccgacacgcgcgacgccaccttctcccatttctgcctgccacagtaccatggggcgcaagttggaccctacgaaggagaagcgggggccaggccgaaaggcccggaagcagaagggtgccgagacagaactcgtcagattcttgcctgcaggtaaggattagttgtggcctcctgatccctcagcttttgcagtattctgtattataacctcttctcttttttagtttctgttcattttatatttaagtggaatcttctctgtatgagttactaggaggtatgaatgaaacagccgtttagattgtagggaactgtttaggtcgtagagatgtgaagacacggacacaactattattcatgcaagggaaaagtgtgatttaaaacaattgtgagttcagaggaagggggagcccatgcagaactgtaaaagtttttgttaagctgggttttgaaaaatgggtaacattgtagcaagaggaagtagtgaaggggaggggtcagtcactgatttgccttttggaaggggtggaaatggaaaagcacggatctggctgcttcatgccgagtagtagtatactgtgtggaagactggtgggaggtaacactggaccgggagtttgtgttgggcattggataaaggatgcagtttattgagatagtaggaagtcctgggcactgtattaaacttgttggtcatgttatatcgcttaatcatcttagagtcctgtgagagaggcactattaaggaaacactttgggaggccgaggcaggtggatcacctgaggtccagtgttcgagaccagcctggccaacatggtgaaaccctgtctttactaaaaatacaacaattagctgggtgtggtgatgggaggctgaggcaatagaatcgcttgaatctgggagaaggaggttgcagtgagttgagatcacgccattgcactccagcctggaagacaagagtgaaactccatttcaaaaaaaaaaaagaaacttgtatacagttattaaataataacagggctgagatttaaatggactccttttaattagtgtactaattctcttaccatgtttatttccgttcccatttatttttaatgtcccctgtaacttgttctgcctcgtttttcttttttaaacagtaagtgacgaaaattccaagaggctgtctagtcgtgctcgaaagaggtaagtgtgggtgtcaaaacttaagtaggttaaattggtactgctcatctttgaccacagagttaattctagrctctcacatttccctatggtggaaatggcagagcctggaagtatcttcccatttcttcactccttgaatctcttgtgtcttttcagggcagccaagaggagattgggctctgttgaagcccctaagacaaataagtctcctgaggccaaaccatygcctggaaagctaccaaaaggtccgtgaaactaagagctggatgctacatgaggagtccctttgggtcctgggtagggaagaactcgctaaacatttccggagtgaaaggaacagccaaaggacattctgaggggtagaaagtacaggctcccagggtgtggggccagggaatgtgtggctgccattagtccaggactcttcaaacccttagggatctctgcaggagctgtccagacagctggtaagaagggaccccagtccctatttaatgctcctcgaggcaagaagcgcccagcacctggcagtgatgaggaagaggaggaggaagactctgaagaagatggtatggtgaaccacggggacctctggggctccgaggacgatgctgatayggtagatgactatggagctgactccaactctgaggatgaggaggaaggtgaagcggtgagattcatctttttgggcattcatagaaggatccttgctatttagtttctttcccagattcttgagactgtttcttagtggcaaggataagcctgactagaggaaaggggtttttgtgctccatcactgtttccctactgccttatatcctcccagtgcactacaagtttgaaagagctgtaggatagagcatttaaaaaaatctagaaggctgtcttggtgtaggtatgggaaggtggacaatggtgtgctccactgatgggcacagaaatgcactttttataaagcagttatctcagaactttgaaaaatttgttccttttggctgggtatggtgcctcacatctgtaatcccagcactttgggaggctgaggcaggaggattgcttgagcccaggaattggagaccagcttgggcaacatagggagatcccgtatctacaaaaaattaaaaaattggcctggcacagtggctcatgcctataatcctagcactttgggaggccaaggtgggcggatcacctgagctccggagttcgagaccagcctggacaatatggcgaaaccccatccctactaaaaatatgaaaattagctggtgtggtggtatatgcctgtaatcccagctacctgggaggctgaggcaggaaaattgcttgaacctgtgaggcggagatggcagtgagccgagatcatgccattgcactccagcctgggcaacaaagtgagactctgtctcaaaaaaaaaaaaagttaagttaaaaaatggtttaaaaattagctgggtgtggtggcgtacgcctgtagtcccagcttctcaggatgctgaagcgggaagatgactggagcttgggaggttgaggctgcagtgagctgtgatcttaccactgcactccagcttgggtgacagagtgagactgtctcaaaaaaaaaaaaaaaaaataactgcttccttttgacatagtaattccctattaaggaagatgatccaaaatgtcagcaaatagttctttactgaggtgcaggaagttattatacaattagtgtgtggatgtattattagaatcgtatagaataaaaagagaaggtccccatgtgcacccccttcctacatccccttgtatctacagggtcattattaggtttgcaggcaccatgtggatcataatgccaaaaactcaggaaacttccaaaatacacaatatgcttaagtaagttatggttcatgcatatgatgcagttacactggtcattatgtctatgaaaatgcctgtgatgtaactgaagtctaaaaagcaagaaacaaacttgaaaatggattatgtgaaaaatacagagtaagtaaaaaaaaaaaaaaaacgacaaaatgggccaggcacggtggctcacacctgtaatcccagcactttgggaggccgaggtgggcggatcacctgaggtcaggagttcaaaaccagcttggccatcatggtgaaaccccatctctgctaaaaatacaaaaaattagctgggcatggtggtgcgcgcctataatcccagctacttgggaggctgaggcaggagaatcatttgaacctgggaggcggaggttgcagtgagccaagacgcgccattgcactccagcctgggggacaagagcgagacttctctcaaaaaaaatatggcagaatggtagtcaagggccatttttgtccttctttatacatccaggtatttttcaagttttttttttttcttaatggaaaagtgaaaaacataatagtagaaagaaaaatgtaatgaaccctttaatttattacttaggttttttttttttttttttgagatgaagtctttctctgttgcccaggctggagtgcagtggctcggtcttggctcactgcaacctccacctcccgggttcaagcaattctcctgcctcagcttcccaagtagctgggatttacaggtgtgtgccaccatgccctcattacttagtttcaacagtgagcaatgctgcgcccatcttattttcatt

SEQ ID NO: 95291 - DNA, 15829 bp, Homo sapiens
cgtggcacggtgggaggctaaggtctaggaggaatgcttgggcacctcatgggagcacagcccagggaatgccctgcttcaccagccaaggttccagtctgggccaccaggagtaggtagattaacctcgtccagtggacactcagcttgttagcagagctgcatggaaacaggcgagatatattggacatgtgtcaggggtgctttggaagggtagaggaactgaaatacggacacagagccagtagggagaggctaaggaggcaaagaagcagcaccctccgaaggatccaccaacccattctgtcaccagaggagcttctggagtacgaggagaagaagcggcaagccgaagaggagaagatggcactgccagaactggttcgggcccaggtgcccttcagctcttgcctggaggcctacggggcccctgagcaggtcgatgacttctggagcacggccctgcaggccaagtcagtagctgtcaagtaagtcctctggtcggggcctgaggctgtgggtctatggcagagctatcccagaggatacttctgtctcttccctgttctttcatccctttgtggttggaacctcagggttgaatcagttgggctggtaatctggccctgatggaaccaaggggccctggtaggggggacacgggtactgactctatctgtcaccttgtcctgccccaaccactccctcttctgtggcacagggtctctttgtagtgtagcctctcttcattgcccctcagtcatggctgagcacaggcacttaggatcagctgtgggcagaatttggatttccagcaaatagccacactttgagcctagccattggcacctggcatgggtgtgagacctgaaaaagggctttggtctcggggagtcagctacccagccctttgctgctcctgccagtgaaacagctcttcctctctgtgtgggttttttttttttttctatgtgtgggtcttgctatgtttttttccctacgtgtgggtcttgctatgttgcccaggttggtctcttaactcctgggctcaagcagtcgtcctgccttggcctcccaaagtgctggaattacagatatgagccaccatgcctgggcttttttctttttcttttttttgttgacagccttccttctggcctctactgctcctcgttggccgaggacaggcatcagacacctgcccaggggaagagaagaatatggaggatcttctgggttattgggacttctacccatgaggggctgaaccccaggtgggagtttcaggagaggaaaaccctggggattgtctgggtaccagcacagtctctcttccctaggaccacacgatttgcctcattccctgactacctggtcatccagatcaagaagttcaccttcggcttagactgggtgcccaagaaactgggtatggctgctggaatgagggaggttacacagaaaatgctagaaaaagaaggggctttaacacatataaactagtgtttctcaaagtttcctctgaaagaggaaaaaaaatcaccttcaatgtttcaaaatttatctagtttgaaagcactaactaaaaatattaaaagacttctttgattgttataggtatgatttacaaccaaaagtgatttttgtagttttttaaaataattggtaaaatgttttcattttgataatcttgaaacaattaattctcgtgagtcttacaggtccctgactgtcatttgagaactcgtgatgtaccttcattttctagataaggaagttgagactcacaggaatataaaatcattctgtctcacaagttctaggccccctgccctgtccatagattatttatggtagatctaggaccagcatcctggcctcccaactcccaggcttagtattatttgtcttatactgggacccctaagatgggtgccgtgcttttagcagctcctctttacagagcagttctgacatagggggcaggggattgaggttcccgaatcactttccaggtaggcctccgggagctgctgaggtgacccttttcccacagatgtgtccatcgagatgccagaggagctcgacatctcccagttgaggggcacagggctgcagccyggagaggaggagctgccagacattgccccacccctggtcactccggatgagcccaaaggtagccttggtttctatggcaacgaagacgaagactccttctgctcccctcacttctcctctccgacatgttagtgactcttcttcctgcctgtctctctcccgtgctgatgggggcctctctgccttgcatcccctgcccctgtcctttgtgtttctcctgtcctccctttcaaatttcctctgccctctttgattgacatggggcctccccagcgcactcctagccaccttctgggtgtggatggcagcagtgccagctagtggcctctctgcccttgttacctccctggtttgggtagggtgggggtatcatgctccagaaacagggcccattctgtgagaatgggcagggacccacattacaattgtgtggtcattttggttttgggataaggtgccaatccatgggagaaaaatgcatggaatgggtgattggaagagggctgggtcctgggggagggaggaggagcaaacagtggcccaatcagtcggtccgtgtacccacaattcccattacagcgcccatgctggatgaatcagtcatcatccagctggtggagatgggattccctatggacgcctgccgcaaagctgtctactacacgggcaacagyggggctgaggccgccatgaactgggtcatgtcacacatggatgatccaggtaggctggggtggggagcagggtggggcagggcctccatcctcccccaaacacatcaaccccttcacatccacagattttgcaaaccccctcatcctgcctggctctagtgggccgggctccacaagcgcagcagccgacccccctcctgaggactgtgtgaccaccattgtctccatgggcttctcccgggaccaggccttgaaagcgctgcgggccacggtatgggctgccccagctaaggacatggggccagtggggaagaagggggtgggaatgaggggccatccttcttgagcaagaccaaagacaacaggtgtggtctggccgaggttgggcaccactcttttgtggctgcgatgaaggagctgaagcctgcgttcactgctgggttttttgccccagaacttgttaaaaatgtaatgcttctgtttggccgggcgcggtggctcacgcctgtaatcccagcactttgggagggtgaggtgggcggatcacgcggtcagcagatcaagaccatcctggctaacacggtgaaaccccgtctctacgaaaaatacaaaaaattaaccaagcgtggtggtgggcgtctgtagtcccagctacttgggaggctgaggcaggagaaaggcgtgaacccgggaggcggagcttgcagtgagccgagatcgcgccactgcactccagcctgggcgacagagcaagactccgtctcaagaaaaaaagtaatgcttccttcctctccaagaacaatagtttagaacgggctgtggactggatcttcagtcacattgacgacctggatgctgaagctgccatggacatctcagagggccgctcagctgccgactccatctctgagtctgtgccagtgggacctaaagtccgggatggtcctggaagtgagtatccccaggaagcaggacaggcctggtggaatctggtcagtctactacaccagatccctcattcaggcagctctgccctcctcaggagtcaggggcttctttccacctcaacgtggcatctgagggtggggttctctgacatggagacaggctctggcccagtacctgcctcacattccctgaaactcctgtcctgagtctgagctgttgtctggatctttgggccatcactcaagcattcctcttctgtttccttctctgaccccctctctcctttcctagagtatcagctctttgccttcattagtcacatgggcacctctaccatgtgtggtcactacgtctgccacatcaagaaagaaggcaggtgagtgctggccacatgcgttttgaatggagaatggtggtgggaatgaggagggccatttggaagtccttgggatagctatgggagaaggtgaagggactgcctgatggggacataaagtgccagagagtgacagaaggtcttgcagcagtgattggcccaagggttggatctggccaccagctttttttttaaatagagatgggatctcactatgttgcccaggctggtcttgaactcctgagctcaagtgatccttctgcctcggcctcccaaagtgctaggattacaggcatgagctaccgtgcctggccaggccccctgcctttgtaaataaattttcactggaacctggacacacttgtttatgtgttgtttgtgcctgttttcacgctgcggcaggaaagttgagtcgttgtgtcagagaccagagagagagcctgcagaacctcaaatactatctggcccttgccagaaaaagtttaccaaccccctgcctccctggaatgggtggagggtggttgtaaaggtactggaggatctgaagacataatagggtccgtgacccttgtgaggttgtgaagctcccttaaggcacatggtggctgggctgtggatttggggtatgggcagagagtgtggagagcacttccaggggccatgtctgagagactacatgatgccactttgaatgcccagtttgttcatccttttctgttttccccacttccccagatgggtgatctacaatgaccagaaagtgtgtgcctccgagaagccgcccaaggacctgggctacatctacttctaccagagagtggccagctaagagcctgcctcaccccttaccaatgagggcaggggaagaccacctggcatgagggagaggggctgagggatggacttcagcccctctgctctgtaccctttttccttttgtccccggcagcagggaagaagctggaggccgtgggagaatggctgggcagagcagaggggcagcgatagactctggggatggagcaggacggggacgggaggggccggccacctgtctgtaaggagactttgttgcttcccctgcccccggaatccacagtgctctgcttctctgtgtcgccccgcccagccccctggtgtggagggaggggtctcgtttgtgcgcgtgggtgtagctttgtgcatcctctcccagtggagcgatcacctgtgcctcccctccccctttgtttgcccctgtgtggttggtcaaggagggatgtgagggaaatagggaccccccgacttgccctcctgcctcagtctttcccccaccctgtctcttccttgtccttctctggaaaatgccaaaatacacgatgtgaataaaagtacaacggctaaattgtgtcctgtttgataccttgggggagaggcttaccttcctggggttagcaggagggcgcttaagaaaactcctaactctggccgcctccctgccaaagtcaagtctccacttttcactggttctagagctctaggaaaattggggttgggtggggaggtggagtagagtgactaaatgccgacacaaagccaaggaaagatggagtgaagaacccttccctctctttattcacacaggagtggaggatttcccaaatgtccctaactggctagctggcttcaggctgggactcagtccctgcagttcctgccaggccttgccagccggggcgagggttgggatgatcctggcggcctatgcctgtgtgggctgcccctcccgctgtgaaccctgcatttgtcccgcaagttttcactcaggtagactccctgggtacaagggtgcctgctcagcagtcgggcatgagctgctccgatgggcgaaggaggttgtctatcccacagttggagaggggccctctctgccccagtgggcgatctgggctacggccaagttgccaccagctagttccgcttgaaaaccacttctggccccgtgggggactcaagtcgccaagcgagggttcccctgagcgccggagctcacaggtctcgccttgtcccgaaagccccgcaatcgaggcggaggcgaccgagcccccgactctcctagaacgttgccacaagaagggggaacgtcggaacagtgcatcatcgggcggcggccggggcggcggcaggagggcgggcggggggcagggctccgggggactgggcgggccatggcggaggacggcgaggaggcggagttccacttcgcggcgctctatakaagtgggcagtggccrcgrctgcgcgcagacactgaccttcagcgcctcggctccagcgccawggcgccctccaggaagttcttcgttgggggaaactggaagatgaacgggcggaagcagagtctgggggagctcatcggcactctgaacgcggccaaggtgccggccgacaccggtaagccctcgccgaggaggggtctggccgggccggggccggggccggggcaggagtggcagcgccctctcccgaggccccgaggccccgaggccggtatccgcgcggacctgatgcagggctgtgggacgagggccgctggggtccgggcaggggcctcgcagccgcagccccgtcggtgcgtcgagggggcagggcggagcacatgatgccccttggactayggggcaggtaaggacgttttgggtctcctggaggaaggtggccccggggcgcgcactggggctgtgcccgccaggcgacggggttaggagcggagcccgaggctctgcgggagaccgggggaggctgggccgcgtgggcttcccgctccctgcgccctggcctcccgcgccgtgcgccgccgcacgtagccccagactcctccccytcctcgccggcgtccgcgtccccgcgccgagctgctcgggctccctgagcccccagatctgaccccttcccttcggcaacctgarcgactcccgccttccacggaagggaccgagcccgtgccaaacaggctgagcgatttgggagtgaggagccatcctaccgctttccccaacctggaaacagcaaagcgcaaggcctctgagtcagttaggtctctgccacccacgggcaaaggatgctctcctccatcctccttcctccctccaccgaaatcggagagccgcgggcctgatccaaagaggcatccccttctcgttcattccccagaggcctcaatacaaaccccaggagttggcccctctccttttgctacaaatccttgccttgcaaaggggaggtgaggatgggctattttagargggaagcagggttgctccctggagaatgctgagtctgtgaggtgcctatgccgagaatagctcgaggaaattggagccccagctgttaaaagagcagagggcagggtgagggccgtggcctctcaggggtatctggaaggctcttcgagttgagtgcagacccagcctgggctggaaaatggacaaaggtcatcttgctggggtgaaaagggggagagcagaaccaagaagaagagggtgagggctggggggctccagggcactggttaggaattgtggggaatgaaggctttctttagtctcatccccctgtggtaccatcttgtcctcagaggtggtttgtgctccccctactgcctatatcgacttcgcccggcagaagctagatcccaagattgctgtggctgcgcagaactgctacaaagtgactaatggggcttttactggggagatcaggtgagatcgaggtggagaggggtgtgtgggacccttccctcactttcctcgttgaggggaaagccacagggtgggctccctgctgaaccttggcttcatctcttcctttagccctggcatgatcaaagactgcggasccacgtgggtggtcctggggcactcagagagaaggcatgtctttggggagtcagatgaggttagtagccaagagagaagataagggatgtctttttccaagaaggatgtctcaccaagtctgtttctcaacagctgattgggcagaaagtggcccatgctctggcagagggactcggagtaatcgcctgcattggggagaagctagatgaaagggaagctggcatcactgagaaggttgttttcgagcagacaaaggtcatcgcaggtatctctggagaaagggacctttgagcctatccagggccacagagactcagagggtagggtcaggccctggagcctgtcttggtccccatgctgatccagaaaaggaaaaaggggagggggagtgacaatctttgcttggggcctatsacttctccagccccaaggtagatgccacctggaaatcccccaatgtccactagggggcagtaggccaccgttcttcgtactccggagaacctggctggagagctctttcttgttcacccttccctccatctgtatctctgccctgcagataacgtgaaggactggagcaaggtcgtcctggcctatgagcctgtgtgggccattggtactggcaagactgcaacaccccaacaggtaaccgggcccaggagccctgccctcatcccagcctgcctcaataggtttggacagacacagcccacrtggrgcaaccccttatttcaaagacacagagaccttgaacccagagacagtgacttgtccaagggcatccagtccagggcctggctkggatcagagccctggtactctgactcagtcagaaaccacastaagtgtccacyggtgccagtgatttttcctcttagagaggcagaaaaggtcttacttaggccarcttsttgttctaggcccaggaagtacacgagaagctccgaggatggctgaagtccaacgtctctgatgcrgtggctcagagcacccgtatcatttatggaggtgagtggctttrgttcccggctgaggtggagtgggctgaggactagactgagccctcggacatggaggtggggatggggcagacycatcccattcttgaccaagcccttgttctgctcccttcccaggctctgtgactggggcaacctgcaaggagctggccagccagcctgatgtggatggcttccttgtgggtggtgcttccctcaagcccgaaytcgtggacatcatcaatgccaaacaatgagccccatccatcttccctacccttcctgccaagccaggractaagcagcccagaagcccagtaactgccctttccctgcatatgcttctgatggtgtcatctgctccttcctgtggcctcatccaaactgtatcttcctttactgtttatatcttcaccctgtaatggttgggaccaggccaatcccttctccacttactataatggttggaactaaacgtcaccaaggtggcttctccttggctgaragayggaaggcgtggtgggatttgctcctgggttccctaggccctagtgagggcagaagagaaaccatcctctcccttcttacaccgtgaggycaagatcccctcagaaggcaggagtgctgccctctcccatggtgcccgtgcctctgtgctgtgtatgtgaaccacccatgtgagggaataaacctggcmctaggtcttgtggtttgtctgccttcactggacttgcccagataatcttcctttttgaggcagctatataaatgatcatttgtgcaagaaaaaaaaaaaaacaagaacaggtttctwtaacaacatctcttactatttttacttgaaaaaatgttttgcgtagcagactgtcatagccttgaacgccggctccctttcttcctccctccaagtggctctggggctgttgatttccgcagagcttgggttggggtaggggctcagcctcaccagctttcagcagctggtctaggccagcagtgcctccccacctccccaaggggaggggtggtggcaagacctcagcacagtctgtggtatcacagggctcactggtagagcaggtagcgcttcatggcagggggcaagggcagggcagacacctggccgagccgggtatcccccaggttgtggcgcacacacaggcggctcaggtgcagaagggagtgtggctccgctgggagagagaaggaggggaatgtaagtatgggtgcagccaccagccagatgtcctcaaactacggggtcctactcagatgcctttctgctttcctgcttcgagtgtgcccacctggctgaaaggggaatttgagatacccggaagttctgcctcccagataagatttcacacatccctagtcagagctgggggtgaagagctggctaaggccctctaaacaacaggccaaggtggctctgacagtggtggagctggcccaggctttgactccagaggcttgggagctggggctgaggtgaggagggatggccctccactctacagcccacacaactgcagagagcagctccaagccctggacccagtcagttcctggggaggctcctcccctgctgccccaccctaaggccctgcctcctccactgctctcctccctggtgcccagggccccagtgtctccatcctgaggtgtggctgaggaaggaagtaggtatgtggcacagagacaggttagagcccagggaatccggtatacagcctgggtacctggctctgcccatccttcttttggacctgtacatcaaacccagtacctaacgctttgcacctcttgctcaggggttgatatctcctgaattctctcatccctgcagttcctccctccattctgaaggttcaccatttactggccaagagaacttgagaaagttgctttctcaagcctgtttcacctctattgctgttgggttaaattaaataacagctgtgaagacccctagcctttcccagcactgaacagaggttgaggcaggctggatgaaggtccatcccctctgctcttgtcagaagagtttccatcccaaaccactgccaccagggacagaaagttctccccacgtctgccccaggcctcacctctcctttcgcccaggtagcggatgcggacctggcactggccccagacagcgcttactgccggatagagggtcctgcccttcagtccgcggaatgctggccccaggtaggtgcccccaatagcgtagcccagagttccctcctccatgtccagaaccaccagcagtctctctggcacctccagctgctcaccctgagttcccgctggatactggggggctccgggccccttgctctgatggtacagcttcccccgcccgatgtcccagccccacgactcgctgttgctgcccagcagcgccgcgtagtggtcagtctgcagcggggcgagggccgtggccacgcccaccacggcatgcgtgcccctctgctctaggggccagctgatctcccaggcgtgcaggccccttgaatagcccctcttaccccgggccccatcagtgctctgggccacgggccgccgctcaaagtacaaccctccttccttgacctcgatgttctctgaacagtctttggggttccaaccgtggcgccgctgggcccccaggtcaggagggggtgcagacagcagctcttccaagccctcgggacaggagaggtcagggtacagggcctgtggcgtgggggtgctgctgctgccccctgccagagctgtctggcccatggaggtgaggagctagaggactccccgaaagaggcttgctggggcgtctttctcttctgaaagttgagctccagtttggattgacctggaagggagctgggagaaaaggggcgtgaagagcagaatcctggcgggggctcgtcacccaggtaccccatcctttcacccaagtttgccaacgggcccgctcctccctcctcgctgccccaaagctcctgggcccttcatctgccctcgccccatctgatccaggtcgccagagactctcgcgagttcgccccatttgggcctcagcatggaccatcccccttactcgcccggagccctcgccgctgcccccgaacctcggttgacttcccagccctggaggtcgccgggcctctgaaggagccgggcggaaagaagccgaggcgcgcagggcgcagaccgccggccgcttccgcccccagctcctcccttgggccgagcccgtcccgcggccccgcccctccagggccctctggggcttaaccctctcatcgccgcccacggccgtgcagctccgaggccacgcccctgtggggccccgccccctcctgggcagttaccgctctataccggcagcagccgcggagagcatgccccgcccccgtggagcccaccccgggcggttaacctcgggtctcagtcccgggctgtgaccctccccgaggccccgcccccacggcgaaggcccggggcagttaacccttctcttgctgcggcagagtccgcacccgggcaggcccatctcagaattaacgctttgatggcatcaccgcgtcgggaatccctggggatggtgttctccaccgtcaagacctttgagccgcctgagcgactaactcctgcgcccctgagggtaaggagcatggggtcaaggaggggcttcattgtgccgaatcccatttctacttccctgtgattctgggtcactgtttctgggctggtccctttctgccccgggttgtgagtcagcctgtgccacctctgaggctgtgaaatctgcttcaggctctaggctgtacgcatcatagttctccctgctggtccagtcttcatactggatgccaatccattactgagccgttgatctcatttggtagagtgtcctgattaagacttcgagtttgagtgaagctatgccactagttaactgcgcgatcttggggaagttgcccgatttctcttttttttttttttgagacagggtcttgctgtcaccaaggctagagtgcagtggcgccatcacagcccactgcagccttgacctcctgggctcaagtgatcctcctacctcagcctcccaagtagctgggactacaggcatgtgctaccacacccagctaatttttaaaaaaatatttttatttttatttttatttttttcgagacagagtcttgctcttgttgcccaggctggagtgcagcggcacgatctcggctctctgtaacctccatctcccaggttcaggggattctcctgcctcagcctcctgagtagctgggattacaggcacctgccaccacgcctagctattttttgtatttttagtagacacagggttttgccatgttggccaggctggtctagaactcctgaccttgtgatctgcctgccttagcctcccaaagtgctgagattacaggtgtgagccaccacgtccggccaaaaaaaaaatttttttagagacagggtctcccaaagtgctgggatttcaggcatgagccactacgcccagccccagatttctgtagttttctgttatgtaaaataggagcaatgatggtagttacctcacagggttgttgtgcagttgaaataatccaggtaaagcatgtagcacagagctgggtacatagtagtcactcaccaagcatagctgtcaatgtgcttaatgagtgccgacactataaggaggcaatataatataatggcaaacatgccagctgtgggaccagactccccgggcatgaatacctgaaggccagtgtgtgtatgaccttgggcaaattactgaacctccctgtgcctgtttcttcctctgtaagacagagatcacattagtatctattgcatggggttggtagtgagaatccaatgaggttatagatgtaacacatttggaagagtttctggttcgcatttaatgatttgtgctaagcactggagattaagcagtgaatccttaaggaggttacaaagacttttataaaataatgtatcatgtagtaatagtaaataaaattatggagatataaagaaagtactataggagtaaaaagaataggactcctatccggggttcaagcagttaggaaaggagcatctccaaaagaggttcacacctgggctgaatcttttcatgtcctagaagaggttcacaccttcacactgggctgaatctttctctttttttttttgagacggagtctagctctgatgcctaggctggagtgcagtggcgtgatctcagctcacctctgcctcctggggtcaagtgattctcctgcctcagcctcccaagtagctgggactacaagcgtgcaccaccatgcctggctaatttttgtatttttagtagagacagggtttcactatgttgcccaggctggcctcgaactcctgacctcgtgatctgcccgcctcggcctcccaaagtgctggggttaccggcatgagccaccgcgcccagcctgggctgaatctaaaaggatgaccaggaattggcctgagacgagccacttctctgcagtatggaggttgggttacggttgctgcatgtagaagatattccagacagaagagtccgcatgaaaaaaagcaagaagcagcaggtgggtttggggaagtacgatatcttcaaggttgctacagccagaaaggaagcatgagaagggccagataagtagacagcaagtcacagaggccttctaggctgagttaaggaatgcaaatgttttcccataggacaggccagtgatggggagccactgtaggatagaagaagagaggaacatggtcagataggcatttgatttatttatatattttgagccagggtctcactttgtcacccaggctggagtggagtagcgtgatcacgactcatggcagccacaacctcctgagctccgctgatcctcctacctcagcctcctgagtagctgggactacaggtgcataccgccatgccgagctaatttatttttatttttttaatttacaaattattatttcttaatttttaaaatagagacagagtctcagtctgttgcccaggctggtctcgaactcctgagtcaagcgatcctcctgcctcagcatcccaaagtactgggattacaggcgtgagccactgtgcctggccagatctgcattttagaaaaaccaccctggcagcaacatagaggagcttcaagggaaatagaactggaagttggctgggcgcgatggctcacacctgtaatcccagcactttggaaggctgagatgggcgaatcacctgaggtttggagttcgagaccagcctggccaacatggagaaaccctgtctctactaaaaatacaaaattagccgggcatggtggagcatgcctgtaatcccagctactcaggaggttgaggcaggagaattgcttgaacctgggaggtggaggttgcggtgagccgagatcacgccattgcactccagcctgggcaacaagagtgaaactctgtctcaaaaaaaaaaaaaaaaaaggactggaagcaaagacaccatttccagcagcccaggtgacaagtgtcaacagcctgaaataggacagtagaaataaggatgaaaataattcaagaaacactgatgaaacggcaagatttggtgactgattagatatggagttgaggctgggcacagtggctcacgcctgtaatcccagcactttgggaggccgaggcaggcggatcacctgaggttgggagtttgagaccagcctggccaacatggtgaaaccctgtctctactaaaaatacaaaaattagctgtgtgtggtggt

SEQ ID NO: 95292 - DNA, 21250 bp, Homo sapiens
cccagtgtgctgacatgcgcctgtaatcccagctactagggaggctgaggcagcagaatggcttgaacccagaaggcagagtttgcagtgagctgagatcacgccactgcaatccagcctgggagacagagcaagactccatctcaaaaaaaaaaaaaaaaaaaaaaaaccaaagaaaaacacggtgaaaccccgtctctactaaaaatacaaaaaaaaaaaattagctgcgtgtggtggcaggcacctgtagtcccagctactcgggaggctgaggcaggagaatggcgtgaacccaggaggcggrgcttgcagtgagccgagattgcgccactgcactccagcctgggcaacagagctagactctgtttcaaaaaaaaaaaaagaaagaatcacagtcagaaagagggagtggggggaaagattagcgctttctcttggagcaggtgaaaagacggctggagaagttcctgagacctgcccctgaggcccagcacacccaactttataacaaaagactgcaagaagggctattatgggggttataagctagggactgtggatgaaaaccgatatatatattatatattatataattatatattatatataaatatatattatatattatataattatatattatatattatatataattacatataatatataatatataattatatattatataatatatattatataataatatatataatatataatttatatatatatatataatatataattatatataatatatataattagatataatatataattatatattatatataattatatataatatattatatataattatatataatatataaatatatataataatatatattatatataatatatataatatataaatatatataatagtatattatatataatatattttatataatatataaatattatatataatagtatattatatataatatataaatattatatataatagtatataatatataatatataatatatattttatatattatataatatattatatattatatatataataactccacaggaagccactgaaatatttagtcttttagactcttaagcttcgttattctgggatggtgctgatgccaatcctcagtggtggcctgggkgctcctgggccgggtaggggtgggttgaagcatctcctccatcccaagtggctttgatggggcgaatggtagagggttactgctgacctttctctgggatggcagcttctcctgaacttctttactttctatactgatctctactcacccccactcctttcttccactcctccctctctacctcttggatttcctcttttgctttatctcattctgacttctctttcttccctatccctgctccctctcaatcaatccactgtgccctgggggtctaggcccaaaacatgctgaagaaggtggaaggcttggaggatctgagcaatctcaccaccttgcatcttcgagacaaccagattgacaccctgagtggcttctccagagaaatgaaatcattgcagtacctcaacctgaggtatgcaccctctccaagccccaccttgcccctacccctgaccaggtgcagcttttgagtctgtgttcttccctggcccaatcccccagtcctagcccacagctggattctcaaggaaagcccggctttccttcctttcttctgcactgagttgcaacactaaatcccttatagcttgtgacccctgaatttttattcattcaatccacaattattgagaatgtgctatgtgccaggccttgtgctgtgttttggggacatttaaagcaatcagaggctgggcatggtggttcatgcctgtactcccagcactttaggaggaaggatcacttgaggccaggagttcaggaccagcctgggcaacctagtgagaccatgtttctacagaagtgaaaataatggcccggcatggtggctcacacctgtagttctagcactttgggaagccgaagtgggcagatcgttggagcctaggagttcaagaccagtctgggcaacatggcaaaatcccatctctaccaaaaatacaaaaattagccaggcatggtgacaggcacctgtaatcccagctactcaggagacttaggcgggaggatcgctggagcctcgaggtggagtttgcagtgagctgagataaagccgctgcactccagcctgggtgacagagccagaccctgcctcaaaaacaaaacaaaaataaaatattaaataaaaattaaaatattaaattaaaaataaaaattaactgagcctggtggtgcacacctgtggtttcagctactcaggaggctgaggttggaggatcacttgagcccaggagttcaaggttgcagtgagccatgattgtgccactgcactccagcctgggtgacagagtgagctgtctctaaaagaaagaaaggaatcagaggtgattcctgttcctaaggggctcacagtctggctccaactcttttttcctcaccctatcctatataagtttccactgcccttctccatttcctcggtcccaattcaccttcccatttcctgcctctcttctcctgagccccacctgtaagggatgacctttttactgattaaaaaaacacaagatgtgctcagatttgaggagagaaggacatttgtaagaaaatcttttggtagaaaggcactgaagatcagcaactcttgtcggatggaggactttatgtgtgtttatttcagcaaacatgtaaggaaactgcctctttccttagtcaacaagaccagattcttgagctggtaatggaaagagcatctccaagtagggagaggtggttgcatctggaagccccaactctcatcctgaccccctgggcattctcttattcatgaactctgccacacggatctggtggggtgtgtatctgtgccatcttcctgttaatgatctagacaggcatgatggacccttcctgagtggctattaaatggggatgttttgagagtaagtcgggtgtgtgtgtggaggggttgagggtgtctcaatgattggcaggtgcctctggggccagagatgctaagcatccaacaatgtatggcagagtccagtacaaagttcctgtagccctcctggtgagaaacactgcatgaggctcagcacgaccatgagatcaggctgaaacacttaaatagatttcataaaagcttaaagccagaacatgaaaataaataaaattccaggcatggtggctcacgcctgtaatcccagcactttgggggggccaaggcaagaggactgcttgaggccaggcgttcaagacaaacctgggcaacatagtgagacccagtctctacaaaaaatttaaacattagccaggtgtggtggcacatgcctggaggtacttaggaagctaaggtgagaggatcacttgagaccaggaattcaaggctgcagtgagctatgatcatgccactgcacccccaaccggggtgacatagtgagaccctgtctcaataaaaataaaataaaaacagagtatcatataatgaggcacattaggagatgaagtttattcttcaggttgggaggctccaacccatccatagccttaggttctctttgtggagagcacgaaccgagcatccaccaccctaaactccagcttagatcccagttccttgtccactgacctaggtcctacagggtggagtgcagtggctcgatctcggctcactgtaatctcaaactcctggggtcaagcaatccctcctcctcagctaagtagcaaggactacaggtgtatgccatcacgcccagctaatttttttatttttagcttttgtacagatggggtctcgctatgttgcccaggctgggtcctaccttctaccctccatttaggtgtgatcacagaaaatgtctctccctgtgaggaaaatttgccctctcctccccagctacaagacagggttgtggcctagctttgctgcaccaaaagaacacatgaatgtattacagagtagaatatggcacttagggattccttgaagggcagaagcaggaccagagcggggtcacacagcacctctgcagtaaatctggcaaggcttggcaggccagtcctcacagtgtttctagggacactggaaccccgagagtcccccagaggccccattcctagcaactggcaaccaaagcccattattcctgcatgaacccctcctgaccacactggcaggggcaacatggtggccaacctgggggagctggccaagcttcgagacctgcccaagctgcgagcrttggtgctgcttgataacccatgcacggacgaaaccagctaccgccaggaggccctggtgcagatgccataccttgaacgcctggacaaggaattctatgaggaggaggaacgggctgaggctgatgwgattcgacagaggctgaaggaagaaaaggagcaggagcctgagccccagcgtgacctggaacccgaacagtcattgatctagcagcagttctagcctctaaagatagtaaggaagcctgcagggaggcagtgggaggaggccaagggctgggcaggtaggggaagaggcaagaggggaagctgctgcagaaggaggtgggagaggaaagcatcagacaagcaggacccttaaagagaggagggttaggagtcagggagaggaaaagggacccaaggggcctgggaccagctgagaaagacttaggaggccagaagagtaagtgaaaagaattggggtggcaggcagaggagttggtggggggtggggcagccatacctgacacagagtgaagtcggctaggaaaggacaggtgtgggtgcatggtaggggctgcaggggaaagttggtggtgtatgcagctggacctaggagagaagcaggagaggaagatccagcacaaaaaatctgaagctaaaaacaggacacagagatgggggaagaaaagagggcagagtgaggcaaaaagagactgaagagatgagggtggccgccaggcactttagataggggagaggctttatttacctctgtttgtttttttttttttttttttttttttttttgcgaggtagtcttgcttagtctccaggctggagtgcagtggcacaatctcagctcactgcaacttccacctcctgggttcaagcaattctcctgcctcagcctcccgagtagctgggactacaggcgcatgcaaccgcgcctggctaatttttgtatttttagtagaaacggggtttcaccacgttagccaggatggtctggatctcctgacctcgtgatctgcccgcctccgccttccaaagtgctgggattacaggggtgagccacagcgcctggtccctatttacttctgtcttctacctccaggagatcaaagacgctggccttcagacctgatcagactcccaggggcagccaccacatgtatgacagagracagaggatgcctgtttttgccccaaagctggaaattcatcacaacctgaggcccaggatctgctctgtgccggtcctctgggcagtgtggggtgcagaatggggtgcctaggcctgagcgttgcctggagcctaggccgggggccgccctcgggcaggcgtgggtgagagccaagmccgcgtgggccgcggggtgctggtaggagtggttggagagacttgcgaaggcggctggggtgttcggatttccaataaagaaacagagtgatgctcctgtgtctgaccgggtttgtgagacattgaggctgtcttgggcttcactggcagtgtgggccttcgtacccgggctacaggggtgcggctctgcctgttactgtcgagtgggtcgggccgtgggtatgagcgcttgtgtgcgctggggccaggtcgtgggtgcccccacccttcccccatcctcctcccttccccactccaccctcgtcggtcccccacccgcgctcgtacgtgcgcctccgccggcagctcctgactcatcgggggctccgggtcacatgcgcccgcgcggccctataggcgcctcctccgcccgccgcccgggagccgcagccgccgccgccactgccactcccgctctctcagcgccgccgtcgccaccgccaccgccaccgccactaccaccgkctgagtctgcagtcccgaggtgaagcccccgccaggcccagagcccctgtggccccctcccytcgccgcggcgcccctgcctcctttacccggtgccgctgcgcacctctccgcatctctggcccggtgcagctgcgcacctgctccgccgcccgcgcccagggcgccttccctccctggccttccccgcccgctgccttcgctttctggccctctgcgcgcctatctctaactgcgcctctccacccttgcctgcctctctcccggtgctcgccctcatctacggttctatttgtttctaagttgggagcctctccgggcggtgcatttttatcctagagcgtcccttttggtttgcatttggggaaatgtcttctctcacygttcctcacctcccccagacttcccttggactcccctctctcctgctcttccccacggcgcccctctccgttcgcgcttcctcccctctgctgcacgggggagagatggaagaagtggggatctgtcgaggcgcagaggggaggacaggcccagctcgcctccactccccaccggctcttatcctcttcacttcccgctgcaacccccagggactgcagggcctttctcaggaccctcttccccgacacctgtattgcatgcgcctttcgcgggaagaggagggatacacgtttgggagagagtgggaccttggggaaggggcagtgttcaggcagctggggtgttaagttggggaggtatgggggctctggaagagaggcccaggcagcccatcctcttcttggctcccaggagaaatgcaagcctggcagccattccgctctgaggagatctgggggaaccccaccggctggccaagctgcaaagaggcgcgggaaccactgtcgtgcccctcccctcctcactgcagtgttctcccatctcatcatttgatcttaccccgccccccactgcagtgacctccccttcctcactgcattgaccttctcctcttcccaggggggagggggaatcccttctacagccctagactgcagccagcgcctccctacccaccccccacccactgcagtaacctctttcccatccctcccagcctcccgccccgcccattgatctcaggctccacccctctaagcctcttatctttctccttccttcccttccacccgaggagatcccagccatcatgtccatagagaagatctgggcccgggagatcctggactcccgcgggaaccccacagtggaggtggatctctatactgccaaaggtaatgggtgtggcatgggccttcctacagccctagcttttccacggccaggctgggttcggccaggggttcggaggccttttttgatacccaggggtatggggtgctgggccaggctcacaagcctgggttgtggcggttggatcctccttgtccggggagccagggtaggtgggtctgtgttcgagtttagcgtgtgaggcatgtcctgcctccgtgtgtctgcctgtgcacttgcatgtgtgcagacgtgtgctgcaagcaattttctttctgcgggctcccacttgtgcatgtggggcctcagatgggtggatgaggaggccacttcttgtgcatctgcctcagtgtgtgtgtggggtgggggtggggggatgttagggagcagtgtggggagagagctagatgtggtaggcaggcagtttagagccagaaggctgaaggactccctggcccctgtgtcctcttcactccctctcattccatgttcctcctttaggtcttttccgggctgcagtgcccagtggagcctctacgggcatctatgaggccctggagctgagggatggagacaaacagcgttacttaggcaaaggtgaggtcccttctcttttccagactctcccccacctcagccttatgcccctacctcacaccagtccccagtcctcctctagcatgscttcccctcctcccattgatcccttccggcccctcctggcccgacccagtccagcctcttcctttccccaggtgtcctgaaggcagtggaccacatcaactccaccatcgcgccagccctcatcagctcagtgaggcctgctctttgctggggatagcagggccagagttctggaaggaatcccggagcagggcaggaggaagggaagaaagaaggcccactcttaggaatcatggttacaagggggaagggtggggaacagcttccttaatgcaccctgctcccatgggagttcaggtcccctaatccaggtaggcccctgtcacagggacctggttggaccctggccaaatgtgagcttgggtgtgaatgaggggaccctctgccttagggctcagcctccagcctggccctgggtgatggaggctctgccctcagggtctctctgtggtggagcaagagaaactggacaacctgatgctggagttggatgggactgagaacaaatgtgagccggggccgggagaaagtggggaagcgtcasggtggggaggcgtggagcagatagagagctgaagggccagtgctgtagtggcttcctcaggaatgactgtcaggggcattctcctctcaaagccagagcaaggggagatgagtttagctgcagagggaaggaccgacagtaggcagaaggaagaccttctttrcagcatacagaggagggrgatggcctgagagagtctgtggtctcagggatatttagaaagaggtgtggctctctgccgtttccaatctcctcctccccacccattcctctccctgctgttttcaagagagcatggatgaggtgttgctggggcaggggtggggagggaggagggggtctcctttactggctccttttggagactacagatggaggcaggagctagaaaggagaaggggacattkkgctcagcaccttcctctataatctcctagccaagtttggggccaatgccatcctgggtgtgtctctggccgtgtgtaaggcaggggcagctgagcgggaactgcccctgtatcgccacattgctcagctggccgggaactcagacctcatcctgcctgtgccggtgagcaataagccaggcctgcggctctcccaggggcgggtrggggagggagcaygcaactcatgaggaatgatgggaggaaagtgaattgagggaggtaaagaggaaggatggggaygtgagacttagtccggaaagctgggggaagtttgggatcttgggttaacactcctggggcgggcagggaggggctctttgacccttctgtctttctgtggctccccaggccttcaacgtgatcaatggtggctctcatgctggcaacaagctggccatgcaggagttcatgatcctcccagtgggagctgagagctttcgggatgccatgcgactaggtgcagaggtctaccatacactcaagggagtcatcaaggacaaatacggcaaggatgccaccaatgtgggggatgaaggtggctttgcccccaatatcctggagaacagtgaaggtgaggccaggagccccactcccagctctaagtcttaccctattgtgggacatcagaaagggtgacacagttcaccaagtcctgagtaggcgtggagggtcctaggactctgcaaactccaaaaggtaccagttcttagagtggattgcagagagcctgccaaattcacatgcagacctagggggacagtatttttttttttttttgagacggagtcttgctctgtcacccaggctggagtgcagtggctcgatctcagctcactgcaagctccgcctcccgggttcacgccattctcctgcctcagcctccygagtagctgggactacaggcgcccgccaccacgcccggctaattttttgtattttttagtagagacagggtttcactgtggtctcgaactcctgacctygtgatcggcccgcctcggcctcccaaagtgctgggattacaagcgtgagccaccacgcctggccaggggacagtcttttacctgcctagccagatgtgttagcatctgttaagttgccactggaaggccgggcgcggtggctcacacctgtaatcccagcactttgggaggctgaggcgggtggatcacctgaggtcaggagtttgagaccagcctggccaacaaggtgaaaccccgtctctactaaaaatacaaaaattagccgggcatggtggcgtgtgcctgtaatcacagatactagcggggctgaggcaggaggatcgcttgtacccgggaggcggaggttgtggtgagccgagatcatgccactgcactccagcctgggcaacagagcgagactccgtctcaaaaaaaaaaaaaaaaaaaaaagttgtcactggagcccttgggaatactgggagatggtctggatgacctgttggattcatcccatccattcgaaatctgtcctgtccccgtcccaacctcctaggcctctagaatccctaatttttctgtgccttgggggaaactgtatagggaatggaaagaatataggtagtggttaagagttaaggttctggggccaaataacctggatttatttgaaccttgacttgtggagttactgctggtgaactttcttacttctctctggaaataataacagaatctagctcatggtagtgtgaggcttaaatgaaatatatataaaatgcttagatgacatgataccaatgaaagtatagtaagtattattaagagaattccattcctctgtgttcctagaagatggcctctcctcccagacctggggataaccccaacagcatccccgccacacttccctcaggaacagmcctccacctctgccctgaatgtcttttctttccctcctcctccttgcccatccctcctgcttgtactataatctcactgtattctgtccccagccttggagctggtgaaggaagccatcgacaaggctggctacacggaaaagatcgttattggcatggatgttgctgcytcagagttttatcgtgatggcaaatatgacttggacttcaagtctcccactgatccttcccgatacatcactggggaccagctgggggcactctaccaggactttgtcagggactatcctggtgagaggaagtggtgtgagggggaggtctgggggcaggcagggacgtgtcccagcaactctggaccttatggggtgctgactcaggcaccaggtgggggtgtcctaagaagaacctgagaacmagggagagggtgcaggagccacctgcaaagactgggctttgtatgtagtgtaaaaatgcaggtaccygtgaccaatctgttctgtctcagatcctgattaaagtcatgggttctgaaaactactggggtcatggggaaggctctggaaggaaccagggatgatatgagtgtgactggatctagcagagaactagaacatttcagtatctttgattgatgaaattgtggatgctgaatggagctgggactgatgtgtgagtagawagaaggctgagggggactgaattagcttctgcaagtctgcccagggcctttatctcaggatggaggcagttggtcgccatcttcctgacacagagcgaaagaaaatcaacataattgcagaattaaggatttggattagcaatgaggaagggcttgctggcagtgagaacaggaaaatgcaaagctaggttgtgaacccttgttactggaagattttttttggggggggggtggggttgttttttttgttttgttttttttttttgagacagagtttgactcttcttgcccaggctggagtgcaatggcgccatctcggctcaccacaacctccacctcccggattcaagcgattcttctgcctcagcctcccgaatagctgggattacaggcatgtgccaccatgcctggctaattttgtatttttagtagagacaggggtttctccatgttggtcaggctggtctccaactcctgacctcaggtaatctatccaccttggtctcccaaagtgctgggattacaggcgtgagccaccacgcctggctggtttgmttttaattaactttttttttttttttttttttttgtagagacagggtttagccatgttgctcatggctggtctcaaactactgggctcaagtgatctgcatgcctcggcctcccaaagtgctgggattacaggcatgagccactgtgcccagcctatggaagtggcgtgagatctctgctcactgcacgattctcttagcctcccaagtagctgggattacaggcgtgcaccaccatgcctggctaatttttgtatttttagtagagatggggttttactatgttagccagggaactcctatcctcaagtgatccrttcacctcagtatcccaaagtgctgggattacaggcatgagccactgtgcctggcctctccatgtaaggttttatgaaataagaatcaggagccaggcgtggtggctcatgcctgtaatcccattactttgggaagccgaggcaggaggactgcttgaatccaggagttcgagactggcctggcaatacagtgagacctcatctctacaaaaattttaaaaattagctgagtgtggtgccacacacctaaagtccctgctactcaggaggctgaggtggcaggatcacttgattggggaggtggaggttgcagtgagctgagattgtgccactgcactccagcctggatgacagaatgaggctctgtcaaaaaaaaaaaaaaagttaagaatcagttagggcaggcttacactggggggatttgtcttagcaaggatgagcaggtgtagttaaccaagggcctgtccatttcagggaataaaggggcatgttcctgcctgatgtagagacccagggaagatgaacacctcccccctccccaccatgctctctctgcagtggtctccattgaggacccatttgaccaggatgattgggctgcctggtccaagttcacagccaatgtagggatccagattgtgggtgatgacctgacagtgaccaacccaaaacgtattgagcgggcagtggaagaaaaggcctgcaactgtctgctgctcaaggtcaaccagatcggctcggtcactgaagccatccaagcgtgagtgacttctggccctctcctgtgtggtcctcgtttctataagactccttttgcaagtgctccagcctaattctacccaggggtgccaaagagagcggggaacctggaatcatcctcacagttctctcacctctgcccctccacccctgattctctgctcccctcccagatagctttcccctagatgtttcctgacatagaccaaggttggggctgggaagagagtgcccagtgtgagagctggagaatcagtgctgtgtgtggatacaggtgcaagctggcccaggagaatggctggggggtcatggtgagtcatcgctcaggagagactgaggacacattcattgctgacctggtggtggggctgtgcacaggccaggtgagtgaggcagcctggtgagtgaagagaactctctgtgggattggtatttctagctcacccacctggtctctccttccaggtgtttgagggtgtcaggggagtttcaggagagcagaagtttcctttcaggggtgagagggcagtcactgagctgcaaatcctttgaaatgtttcagatcaagactggtgccccgtgccgttctgaacgtctggctaaatacaaccagctcatgaggtgagggtccctggggtgggagcccctggcccagatggctaaaggccccatttgcctgccagaccatctgtagcaccaagggcctggataacaktccatttcctggataacagtccaacagataatattggtttttgcttcctgggtttattgatggcctgattgacaaatcccagagatcacatgggaaagccagggaatgctaagccttggggcaggacacaaaagcaggtggtgtgggggtggttggagtctgggggacccctagagagagaagcaggatcctcctgcatccctgaccacttcctttgtggttcatctctctcagaattgaggaagagctgggggatgaagctcgctttgccggacataacttccgtaatcccagtgtgctgtgattcctctgcttgcctggagacgtggaacctctgtctcatcctcctggaaccttgctgtcctgatctgtgatagttcaccccctgagatcccctgagccccagggtgcccagaacttccctgattgacctgctccgctgctccttggcttacctgacctcttgctgtctctgctcgccctcctttctgtgccctactcattggggttccgcactttccacttcttcctttctctttctctcttccctcagaaactagaaatgtgaatgaggattattataaaagggggtcyrtggaagaatgatcagcatctgtgatgggagcgtcagggttggtgtgctgaggtgttagagagggaccatgtgtcacttgtgctttgctcttgtcccacgtgtcttccactttgcatatgagccgtgaactgtgcatagtgctgggatggaggggagtgttgggcatgtgatcacgcctggctaataaggctttagtgtatttatttatttatttattttatttgtttttcattcatcccattaatcatttccccataactcaatggcctaaaactggcctgacttgggggaacgatgtgtctgtatttcatgtggctgtagatcccaagatgactggggtgggaggtcttgctagaatgggaagggtcatagaaagggccttgacatcagttcctttgtgtgtactcactgaagcctgcgttggtccagagcggaggctgtgtgcctgggggagttttcctctatacatctctccccaaccctaggttccctgttcttcctccagctgcaccagagcaacctctcactccccatgccacgttccacagttgccaccmcctctgtggcattgaaatgagcacctccattaaagtctgaatcagtgcactgttgtgtctaaggagtcttactctagtccctatgaggggagagaagatggagcacctggaagctggtgaaactggatagcagagctgggggggcacaaaaagaggaagacaaactgaacaaatatggccgagatgatggcactgcctaccccattctggctaggtggggtgcatgtggcccctgctttcttagcagaaggcttggctcccagacgcaggtgaattaaggggttcaagagcccctaaaagcataaaatattttgtgtgtgtgtgtgtgtgcacgcgcattttgggggaaagggggtctaaggtgttttcatatccaaagggcttgtggactggagcagctcctgtactgggcctctgccaacaaaaccctggctggttctcgaatggaacaggacttcatggccatcacccactgcaagatggggaaatgggaaggaagaatggttccgggggtagtatacggaaggacctaaggaaacagagtcctcaataaactgaagattcaggaacaaaagtgcttaacagaaccctggctgggtcagactaacagtaggtttccaatatgtggctagagacgtactactccttagctataactcgttaactcttatggggcctcagcgttgagatgctcattctaggtacccccgagggggacaaatcccttcctagtggctcggatgcaaggttgcgtcccacagatagggtttgcacatgggagatctaaccactagagggagtcagagttttgcaggacgccatactggacgccaagtgggaggaacttcaaggctgtcccctgcgggcctcccgctctgcttctgcgaaggtctggtcctggctccctctgccatcctgcccagctccaaggctaaaataggttctagttctgtatgggtagggcccatttcttttcttgccctccttcccgggtccctgacacctcagccaytttcagttcaaagagcctcatgccccctttccatttctgtgccttttagtttcagtgtgggcatctcatctttcccttttctcctggcgaccctttatgcctcccttggggtttcctgtactttcctctgtgcctctcagttttctctggggtccctgatacccatcttaccttagtaactcccagactgaccaggactatcctagtttgagcctagttcctagcctctgtcctttctttcatccctcctcaccaggtcgccttctctgacagtctggccccccaacccccaaagtatcggggttggattgggttacagctagctctgcctgggcctcccaggcccttctctccactttccctttgtgccgttgcctggagaccaatgggttgtggggggctgagccagagagggagctggggtgagggatggctggggctgtgtgtgtgcgtgtgcgtgtgtgtgtgtgtgtgtgtgtgtgtgtgagagagagagagagagatgtcccctgcagctggactataagcctggccctcaggtaggggaggaatgggagagggtagacaatggtttcttttgtgactctcaccatcccctatccccacatatgcctaaatttttcttttagtatccattgtagcccattccttagtgattaaaaaacaagggagaagagctcagcctggaagggatttggaaagggcttgagccaaggcccagtgggagactgaactgagtggtacagaaagagaggaaatgccatggggagagagggtgagagggaaagggggagccctggaacaaagtcaggggtggggaggagcagcagctaccctagagcaagaggaagggagtcggggtgcacagggagacagggagctggcctggtctcagggaggccctgggaggaaggtgtgcttggagtggtaaagtgagtgccaaccaattcaagggacttcagagtgatgactcattcccaggccaaggaagtgttcctgttcctgcgcccagttccccagtgctctggaatcttgtttagagcttttgagtattcccagaactttgttgaatctggcccaaggaattgtgagacaaaaatctactgagctgctccagagctaacctccttccttccctgaaggcaggtgggatcttgccaattcagggcccacccttagcctccagcaagactggccccacaagtacccgacccccaccccaaatctggagctctactgagggctcctaatccacactccagctccagctcttccggcttgccagcctgcctccctcccattctctggccttcccaatttctgctgccaaaaatcaccctgtgtcctttgtcctgggagatgttgccgcttggtggagggccaggagggagcccaggagaaggaactggtggtgggctggcggaggtgctggcttcacggccrggagcagactgactgccagaggctacctggagagcaggggagggagaggaagggttgggaggagcctgcagtctgtggtggggactgtctccaccttagaacaagtgggattgagcaacaaggatacccagggatttgggtccacattaagcccagtcttcacccgactgcttccctgtgacccaggggatctttagtgatgactttcaacagatttgagaaggaaaatggagatgccactagatggaaggcctgaggatggtgtctcactcctccaagctgtatcccttacctatctacccatgagcttgccagcaacctccccccgctcccacatctgtcatttcctttaactgccctcgtttcccatctccattttttctttttttttttgagacggcgtctcgctctgtctcccaggctggagtgcagtggcgcgatctctgcttgctgaaacctttgcctcccaggttcaaggattctcctgcctcagcctctgagtagctgggattacaggcatgcgccaccacacccggctaatttttgtatttttagtagagacggggtttcgccatgttggccaggctggtcttgaactcctgacaagtgacccacccgactcagcctccgaaagtgctgagattacaggcgtgagcccccgcaccggccccatctccattttcttttcccatccatgatctttcctcttccatactgccgccagccataggccttgttcagcttacatttccttccaatcttcttatccccctcttccccattctgcccgcccaagtaaaccctcctcggctctactgggagcccccacccccaggatccagccagcccggtgtctcccacccttctttcccatccagagccctcctttctcacccagaacctattttccctagaattggcacctgggcccacctcgttcatcccttcttaaggttcctcacgcgttccctcctctctctcctcactgacgtttcctctggacttctctctctccagcattccttcatccccccacccccaattcttatatttatgactcttttgtcaacactaatcacccccaaaagctttactttttccagaagccccatctttctatatatgtcatcttttcaatttttctctctccttatgaccccaaacttccatcccattctctctgataatagcccccaaacccgtctggctccatctctgccacagatccctcaccccaagcttctctcacttctcaccaggcacccacaaagcccccaggcagctccatctttccaatccaatcccattatcccaatctctaccccaggatcccccaaactcctcccacttcacctctgccacagacccgctcgcccccaaacttcagcctcccctcatctgccctcaccacccacagcccctcctacctagccctctcccgcgccgggcccgcgggctccccacattccgccacggctagccctccccgcgccccggccccctcggcctcggcctcggccaactcgcgctgcgcctccccctctccggctccccctctctcccccctcgcggcttgcctcgcgctccctccctcgcgtctccctcctggcccctctctcctccgttcctccgcgctccctccttctccctcttcctcccttctcccatccccctctcccaggctccctcccttcgccgtccgctttcctgtgcgagtcgccggacgcaccgcccagcccgtccgcagccccgcgccgggtcggggcctcgggccgggccatttcggagggaccgcggcttcggggaggggctaggaggggggagagggagccgactgccggggaaggggcgggggccgcgggcgaggcggccgaggggcccgggatcgcgcgggtgcgggctgcgctaggcgggcgcgggcggcggcgggtcggaaccgcgccgagggccgggcgggccgcggggccgggcggcgcggcgggggcgggcggcgcggcccggggcattccgggcggccagggggaggcggcgagcccggggaggtggggagcagagcggggatcggggtttgctccgggggccggcgggcgattggggccaggcggggaaaaggggggatgggggccgccctccgggggggtcggggccgccgccgccgtcgtcgcggcggcgactgaggccgagaagaggagaggggggcgggggagctgccgccgccgccccccagaggcgccggagcccggaatcccgctcggagccagccagccgtcccgagctaccagcaggtaaggtctgcggccgcctgggccccgggcccgcggggttctgtcccgcccgggctccggcctgcggctccccacccccacccctcccagttccccctcctgccgccgccgcctccatttgttattttcccaatcccgtccccccactgcgggctctgcctggcctgagggccgggggctcagggggtggggcccgccgaggagagtcgggggccagggtttcgggaggatcgggaaggtggggaaggagggagggtctccggaggaggcctgtggggccagagggtatccgggacccgcagactcaaaagaggaggaacatcgaggccggggttggcggaggaaaacgggggatgctgtgagtggggttccgggcgaaggcagaatggataggagagatggcagcgaggtggggcatgaagcctccaggaaaaagctccaaaggaccagaacacgggttccggagcctggggttgggggctttaggaatagacgggaagtgggaaacgggaaaggggtgtggtaggtggaaagagggattgtggctgatgaacctgggggagacggaggcttgggcaaagagaggtccatttttgagaagagccggaggttttccagcgtggaagagggaaggccatgtctttgtgacggttttcattcccctactgcaggtcacctctgaccctgttttccctatcccagacatagttatttcttggagagggcactggggcccagtagtgtgggttatcccaaaactagtgaggaggaaaacaggaacacagaagggggagttgggaagaaaggggttctgggaggatggaaatggagaattgagcaaccttacaggcactccaggcaagttgcgacctccaccctccaccctccaatttccggagcgtccgctgcccctggagctgtgatctatatagggaggccttagttactgctttgagctcaaagatctccctttgtgcatgggcttattttgactagggtaggtaccttcaagctcccttacctgaggtgctataggagggtaggagttgctttggcaactggggtagggggtagctgccagatggacacctgggatggtctcttgaggggcaccttttgccactgtgttgctatggtagtgatccagtgggatgtcagattggttgggggggcttcgaatgtttattggacctcagcctgtggctgtccttgggactctgggctgggttttggaggttgtttctggatctgttggtggttgggagtttccccacggtgtgcaccctttcatgttgaagtctgttggaa

SEQ ID NO: 95293 - DNA, 29118 bp, Homo sapiens
  misc_feature (1)...(29118): n = A,T,C or G
cttccaccttcttcacgcagtctacctctctctgtccttcccctcagacccttctgatgactgtaatctcctgtcctgtgtcatccatatgtccctcctccagtagggctcagcctgtccacccctgccaggcctctagttcttccactctgcctttgttccactttggacctccttgtgtttgtctgactcagttcccaggcttggatcccttcacccaaatgcatggtttgcccyaaacctgccttctggtgacaccttcctcttctctgccctccagcctctgcctcggtgcaccctctcattgaccccctggcctcagggtctcaccttacccggatcccctacccagctggaactctccctaaccccctgcttcctcaccctctgcacgagaacgaagttcttcgtcaccagctctttggtaaggatggaagttggggtaggcagctccaatgagaaaagggcagaaaggaggtatttgggtggggggatgggcctagttgggcttggggagggatgaggaggtgcctagaggagctgggcatgggaataggagagctggagctctgcccaagagaagcacgagttttagtgtcagcctaagaggttcgaatcccaattccaccctaccactggcaacttacagaactgggtgtgttacctcactttttagttcattacctttgtatgtaaaggagctggctatcccctggtccagagcaggtacttgttatccgttggtcatatgccccttgcccttcctgctcacagctgccccttaccgggacctgccggcctccctttctgccccgatgtcagcagctcatcagctgcaggccatgcacgcacagtcagctgagctgcagcgcttggcgctggaacagcagcagtggctgcatgcccatcacccgctgcacagtgtgccgctgcctgcccaggaggactactacaggtaccctagggtgccccagcccaggggacatgggctcagcgagcctgggaggagctgtgggcatggtacggctgggcaccgtgctcctgggggagggaacccctcctctcccaaccccttcggtaagagggggcaaggtcagagttggtctcaagtctcttacctctctgctatgcactgccccttccctagtcacctgaagaaggaaagcgacaagccactgtagaacctgcgatcaagagagcaccatggctcctacattggaccttggagcacccccaccctccccccaccgtgcccttggcctgccacccagagccaagagggtgctgctcagttgcagggcctccgcagctggacagagagtgggggagggagggacagacagaaggccaaggcccgatgtggtgtgcagaggtggggaggtggcgaggatggggacagaaagcgcacagaatcttggaccaggtctctcttccttgtcccccctgcttttctcctcccccatgcccaacccctgtggccgccgcccctcccctgccccgttggtgtgattatttcatctgttagatgtggctgttttgcgtagcatcgtgtgccacccctgcccctccccgatccctgtgtgcgcgccccctctgcaatgtatgccccttgccccttccccacactaataatttatatatataaatatctatatgacgctcttaaaaaaacatcccaaccaaaaccaaccaaacaaaaacatcctcacaactccccaggaacatggctgtgactattctttgcgggatatgggggtgaggctgggtctcagtgcagcggtgcttagagagaactgcagccagggcctggcagggaagcgggaagagaccagaccttcttaaggaacggggtgtgggggctgggaagaattggagaggggatccctgaagagcccagagccttgactcagctggaggcggtaccatgggtgctggtgccccctcctgccccaaggctgggcaggaccgctgcgcgccagtggaggcctcggtctgggctctgtggcttatgcctgtgagacgcgggtggattgcttgagcccaggagttggaaaccagcttgggcaacatagagaaaccccatcttaagacaaaatcagctgggggttgtggtgcacttgtggtcccagctactcaggaggctgaggtgggaggatcacttgggggtcgaggctacagtgagtcatgatcgcaccactgcactctagcctgggtgacagagcaaggccctatctcaaaacaaacaaacaaaagacaccccaaccaaccaaacactagaggcctgggacaggcccacctctgacgtggtcagttctaggaatctattcagacgggtctcactgctaggagccaccagagtcctccggaacaagggcttcagagtcctgaaacctttccgtggaatactttaagaaacggttatgaggccaggcgcgacggctcacgctggtaatcccaggactttgggaggccgaggcgggcggatcacgaggtcaggagttccagaccagcttggccaacatggcaaaaccctgtctctactaaaaacaaaacattagctgggcatggtggcgcgcgcctgtcgtcccagcgacttgggaggttgaggcaggagaatcgcttgaacccgggaggtggaggttatggtgagccaagatcccccccagctgcactccagcttggcgacagagcaagactccgtctcaaaaacaaaaaacaaagccggttatgaagcgggggtggggtgggctagttttaataggtccaggcgattagtacctggcatccttaaccacctacagtttgagaagggagtgggtgataaaagcctggaagggaagggaaatcgggccgggcattaggctccatcgctcatcaatagacaaggcctttaggaaactgcgacaacggcttttgctctgggcctttactgccgaatccaggtctccgggcttaacaacaacgaaggggctgtgactggctgctttctcaaccaatcagcaccgaactcatttgcatgggctgagaacaaatgttcgcgaactctagaaatgaatgacttaagtaagttccttagaatattatttttcctactgaaagttaccacatgcgtcgttgtttatacagtaataggaacaagaaaaaagtcacctaagctcaccctcatcaattgtggagttcctttatatcccatcttctctccaaacacatacgcagcagtgttacagctcttttagaatttgtctagtaggctttctggytttttaccggaaagcccctcttatgatgtttgttgccaatgatagattgttttcactgtgcaaaaattatgggtagttttggtggtcttgatgcagttgtaagcttggggtatgaaggtttgggccacgcctgggcgcttccggctgcgccggatgctgtttcctttccgctcccaggggcgttgggaacggttgtaggacgtggctctttattcgtgagttttccatttacctccgctgaacctagagcttcagacgccctatggcgtccgcctcgacccaaccggcggccttgagcgctgagcaagcaaagggtgagaatcgtcctagtcaaggcatgggctgctggcctggggtagtcaaggcatgggctgctggtctggggaggatgcgggcggagratgtggggcgacaaacctggctacgtccgccgggaaaatggggtaggggacgccgggtaccgtccttctaagtggggcgcttgcccccaagacttgggatcttattgggttacctacagcctcaatccactaattccttgcgctctccgctgggcccgctgtctgttctccgacgcctacccgggacgcctccctgggatgcttctggcgcgcagtggtcctcgcggaggtgatccaggcgttctccgccccggagaatgcagtgcgcatggacgaggctcgggataacgcctgcaacgacatgggtaagatgctgcaattcgtgctgcccgtggccacgcagatccagcaggaggttatcaaagcctatggcttcagctgcgacggggaaggtgggtcagacgcgggaaggcgggtcagacgcgggaaggcgggagttgggtcgggagagggcgccggatctgtgggcccatgagcggttgtcccctttctcgccacacggcggcagccacaatctgactaacattcttggcactcagagcccagggtctaccctgagcttgtgcgtccgagttgcgttttgtacagtagaggttctgtatcccttacccgaaatggttgggaccggaagtgtttcgggttttttcagatttcggaatatttacatatacatggatatcttgggggatgggacctaaatctgaacacgaaattgttttgtttcatatacacgcaccttatgcacatagcctgagggtaattttatataatagtctgaataattttgtgcatgagacaaagttttgactgcgttttgactacagtctcccccaccccccactatgaagtcaggtgtggaattttccattttcggcctcacactggcactcataatttcagattttggattttctaattaaggatggccaacctgtactgttaatcacattattattccattttgtgatgaggaagcaaactctaatggtgcagactctcgagtagcagagctggacttaaatgctgttgtgccaccttttagtgacatgtctgcatgacagcagtggctgcagtctctccagggtgtttcagctaatttttgtttggggggggttggtggttaaatttttggtgagatcctggtgttccccaaaggtgttgactgattcagctctgctgcctcatagccttcctgagttccagctacagacctggggtctcgtgttcattcttggggttccagtgactaaactgctaaaatggttcacctgagagcaagaagcacactgccttgggacattttcattcactgcatcccatctagttgtgcccagtgtagaccaaatgtcatcatccaaaccacacgggacagaggcctgcatgcgtcctgtttggcaaacagctgcccagccagtgggggagcagttcatgcttaaactaccaccccctccaggtgtcttaggcacgctggtccttaggagaagggttgaccttccactccctcttgcaggtgtccttaagtttgctcgcttggtcaagtcctacgaagcccaggatcctgagatcgccagcctgtcaggcaagctgaaggcgctgtttctgccgcccatgaccctgccaccccatgggcctgctgctggtggcagcgtggccgcctcctgagagttggccctcccttgtgccactgccaggggaggaaaggccttgatgttccagacaataataaatgcgcctgtgacttagccttggtgtcagtctcttgcggacctgacaacccccatctctccttccctgattccctctgcctttccaggccccatccccctgaacagctcctccctatggtcctggctgggcctaaccctgccccagggcctaaccctacctgaggctcctccccttcccccggggcaggttgagaggctggagtgggtccctcagcgccctgggtgggtgggcctgcacagggggtacctccttctctgaggaactgggctgttagggattttccttaggccctttggtttccgcctacggagaggtttcccccattggttgctcttcctcagccagggttacttcctggtctgttcccctacccaataccccgccgctctgtcagcttgagctccaggtggagctccaggtggctcctcctctcccgggggaaggcggccctggaccagcaggcgggcctgctgtactcccgctttggggctgcagggaagctggccgctgtgggcggtctcgggccagccccgccccacctgtccttttcctggagactattagtccagggtttgtccctgcagtgccattggcctggcaggcaggatcgaggaggaagtggctgattactgagcggttcttcctcacctggcttgggccactgtgcacagctgtgccgctggctcagccccgccccctgcggccctcygccgtggcttccccctccctacagagagatgctgtcccgtgggtaagtcccgggcaccatcggggtcccagtctcctgttagttttggagggagggagggctttgttgatgctcactccgacgtgtgtgaacgtgagtgcgatctgccgctgccctgcgcctgtttccggtccctatgaacttccccttcccgcaaggtgtgaggacccccggctcactcatgctcctctgccccctctttaacattttcccctggacaagtgtgtatctgttctctccattgcatttctacttccagcctctgggctcctgcttctgcctcctgcttaggacctgtccccctgggtagctcacaacacctcaaacatagcagtcagaggccacccgcgaaggccctcccacgtccagccaacttctccgcacttcccaacatcagactttggtcccatcttctttgtttcctttcacttccctttcccctgcatcattcattcaacaggtacgtgttgagcatctattatgcaccaggtgctgtttaagatgctggtaatactggagtgaacaagacagacatggtctctgctctcacggagcttacattccagtgggaggttacagaccgaacaaataacccaataaattggatcattgcagattctcagaagtattacgcagaaaatagacagccttggccgggtgtagtggttcacacctgtgatcccagcactgtgggaggctgaggcgagaggattgcttgagcccaggagtttgagaccagcctggccaatatagtgagaccctgtctctacaaaaaataagaaattagctgggtgtggtggcacacgtcctgtggttccagctatggagaggctaaggtgagaggcttgcttgagcctgggaggtcaaggctgcagtcagcgatgattgcaccactgcacaccagcctgggcgacagagtgagaccttgtctcaaaaaaaaaaaaaaaaaaagaaaatgaaccagcttcatatgctagcaagtgactgggtgtgcaggtgacattactagctggagggatcagggaggccttcccgaggaggtgacatttgagctgagacccggatgaggaggaagaggagctggccatgtgacgtagtgatcaagagtcaagcatctctgggcagaggagatggtgagcacaaagccctaatgtgggaacaaacaaaaaaaggacagtgtgcccgtggcagaggaccctagtggagcggaggcagggccacagcaggttagaccwtgttggagctaggatgttgaaagtgaaaacctgacgagatgaggtggcgcacgtctgtgatcccagcactttgggaggccgaagggggaagattgcttgagctcaggagtttaaaaccagcctgggcaacatagagagaccccatctctattaaaaaaaaatactgggtatgatggcccaagcatgtggtagtcctagcagtttgggaggctgaggtgggaggatcacttgagcccaagagttcaagaccaccctgggcaacatagggagagacctcatctctactacgactacgactactattactactaataaatagctggatgtagtggcatgcacctgtggtctcagttacttggaaggctgaggcaggaggatcacctgagccaaggaggtcgacgctgcagtgagttggattgtgacactgcacttcagcctgggtgataaagcaagattctgtgtcaaaaaaaaaaaaaaaagagagggaaggaaagaaggaagggaaggaagaaagaaaaagagaaagaaggaaaaaaaggaaagagcgagaaagaagaaagaaaaggaaggaaggaaagaaagaaaagaaaggaaagaaaaagaaaaagtgacacccagtcgaaagaagaaaggaaagaaaaagaaaaagtgacaaccggtcgaaagaaaaaagaaaaagtgacaaccggctgggcatggtggctcaagcctgtaatcccagcactttgggaggccgaggcaggtggatcacgaggtcaggagttcaagaccagcctggccaacatggtgaaaccctgtctcaactaaagatacaaaaaaaaaattaggctggcacagtggtgcgcacctgtgagtcccagctactagggaggctgaggcaggagaattgcttgaacccaggaggcggaggttgcagtgagccgagattgcgtcactgcactccagcctgagtgcagcgggagagactccatctcaaaaaaaaaaaaaaaagaaaagaaaaagtgacaacctgcttacagagtactggcgagtttgtgggtgggtggctccctagccctgctgattcttgcttctcacactcatgtctgcccctgccccagtgcacatcttgtcactgtcggccccaccgatggggttcctactgagtcttctggtccctgatcccgtctgtggtcattttcctgccaggtagcttggccaggcctcccctggtgcagatttcatccttggtttctcagcctggccttgaatgaccctctacagcagggtccccasctctcagaacaactttgctccagccacatggcttgctcacggccaggcactgcccatgtggactctgtgcgtgccacctctttgccctgacccatgttgcctctgggggagcacttcttcctccaccttccatcatgggctgtggcagtgcccatcccatctgcccccgacgctgtctgctgcagtatggttgttgggggaaagggcaccaggctccggcgtctgacagccgtgttttacccaccttcctactcactagcttgtgaccttgggcaattacttaacatctctgagtcttagtttctgtttctaaaattgggtgaataacacctactaagtagggttggcctgaggattaatagtataatgtaaaagctggcagcactgaaaccctgccacttaccagcttttcacatcagtatttgggaaatattgttaagctcatttgtcaggcggggattctgaggctcagagcagttccagaactttctacagattattttgccttgtttgcgcttccagactgcctatcttcttgtatcaccattgatcttgatctgtatggtttttaatttttttttttttgagacggagtttcactctgttgcccaggctggagtgcggtggcaygatctcggctcactgcaacctccacctcctgagaagctgggattacaggcatgtgccaccacacccggctaatctttgtatttttagtagagttggggtttcactatgttggccaggctggtctcgatctcctgacctcgtgatccgccagccttggcctcccaaagtgctgggattacaggcgtgagccactgcgcccggccaacttcacgtttatacacacccatgcaaacagcatccagatagagacaaagagccttccctgtaccctaaaagtttcccagaaattgttcccagttagcatatttatttttataaaggtaatgcatgcccatcatataacattcaaaaaggtatgtagagaaccaagtgtctcccccagccctgtcctccagccacccagtttccctccctaggggaagccaccaatatgtgtttcnnnnnnnnnnnnnnnnnnnnagtataatgtaaaagctggcagcactgaaaccctgccacttaccagcttttcacatcagtatttgggaaatattgttaagctcatttgtcaggcggggattctgaggctcagagcagttccagaactttctacagattattttgccttgtttgcgcttccagactgcctatcttcttgtatcaccattgatcttgatctgtatggtttttaatttttttttttttgagacggagtttcactctgttgcccaggctggagtgcggtggcatgatctcggctcactgcaacctccacctcctgagaagctgggattacaggctagtagagatggggttccactgtgttgcccagctggtctcgaactcctgacctcaagtgatcctcccacctcggcctcccaaagtgctgggattacaggtgtaagtcactgcgcccagctgtatttttattttttgagacagggtctcactctgtcacccaggccggattacagtggcacaaccatggctcactgcagcctcgaccaccccaggctcaagcgatcctcccatctcagtctcccaagtacctggggctacaggggtgtgccaccacacctggctaaattttgtattttttgtagagacagggtttctccaggtttcctaggctgctctcaaacttggtgtcaagtaatccaccagcctcacccccacaaagtgctgggattacaggcgtgagccactgcgcctggccttgatctctacttttatcttcctgcttccaaggaaatatttttttcttctgaattatcaggcatttactcttgtaattcttagtctccctacgcttgtttcctcccataagaaaatggggaaaattattcctacatcacagggctgtctgaggcctaaatgagatcgtgtatgtgaaagtgatctgcaaaccccacaccatgccaaggtaagggaggtagttttttattttcctgccaaaggatagcagaagctgtacctcttgtctgagttctgtctcttggcttgacacccttcagaggaattcctgcctcttccatgggtcaggaagaggtgcctagttagtttcttctgggtgccgagttaattccttcccaccaagtgggtttaagccctggaaggagtgtcttggggccagggtgcagtgggcgtttggtgctgagcatggacctgaaacttcgtgtgtggtcagatttatgttccatgcgtggggatgtgcaccggaccaggtatgtgtgtaggtggacatggatgatgaggtgtgtgtgctgtgactgtgtgtgcacccttgcctgcgtatgacaagcaggctgtgtgtgtaggaccaggaagctgtacttgtggccaggtatgtggctatggactgacgagcttgtttgttgaacacttgctcagtgccaggcatcgcactggactctgaacactccgagatgagcgagagcgccagcgggtgtcccgcgctgcagccagctttgcatgtgctcttcttgctccttggcgttgggcgtgggggttccgcggatttccggggctctggggtggtgtccaagctgaaggggtagtcaaagctggaccatgcaataaacccaccaggcagattccccagggcaccagtgagagaagaaaaccagaaacaaatagaacaaaaagaaagaaagaaaagtggaaaagccttttttgggggaaaacattgatgtttgatgtttctaaaaatgataatgtagttatcatgggaaaattagacttgttgggcttaaaactttttcttcttttacctgaagcagaacatgcataatgttcataaatattaagcacacaacctggctccatttttttttttttttttgaaatagagtcttactgtgttgccaggctggagtgcagtggtgtgatcttggctcgctgcaacctccgcttcctgggttcaagtgattctcctgcttcaacctcccgagtagctgggattacaggcgcccaccaccatgcccagctaatttttttgtatttttagtagagagggggtttcaccatgttggccaggatggtctcgatctcctgacctcgtgatccgccagccttggcctcccaaagtgctgggattacaggcgtgagccactgcgcccggccaacttcacgtttatacacacccatgcaaacagcatccagatagagacaaagagccttccctgtaccctaaaagtttcccagaaattgttcccagttagcatatttatttttataaaggtaatgcatgcccatcatataacattcaaaaaggtatgtagagaaccaagtgtctcccccagccctgtcctccagccacccagtttccctccctaggggaagccaccaatatgtgtttcttatgtatcccctgttgagctgcttttcctcgttttggtttggcggtgttgatgtttgtatttggaattacaggtaggcagcatcatataccttagtgtttagggcctctaagatcaaccagccctgagaaaatcagccatggtgaggaccttgtcccccagcccccaggagataggccccctggtgggagtgctggggcagggcagaggcctagggacaagaattagaaaggacccatgttgacagggctgctcagggtcatgttgtccatccctctgccacagtggcatggacaaactgcatatgttggttagaggagggcacccttctctcttgcaagcattggcaaggtcttaactattagtctcctgctcccatggcagcccctttggacaaggaggctcttaatctctgttctttgaagccctgagggctggtgtataggagttcaaagcactggctttggaaccggactgtctgggtttgaatcctggcactgcagctgactcactgatggactcaggcaatgccttaaactccctgagcctcaggttccttgtctgtaaaatgataaagatagcccctgtttcatagggctgtggtgagaaaccaatcagacaaggcatgtgaacgccattatagcacagcgcccggcatccagcaggactcactcgatgacagttgtcaccgccatcattgttattagcgtgggccagggagggctgcgtaaaagcagctggtggaggagggagagatgccgtgggaccgtctgggttcgcatgcgtgaagtattatctgggcctggagtgtgcaaggcacacatgtgtccttactgcatgtgttgtcacatatgtgcaatgccatgctcctgagcctttgattgcagacrtgtgggaagtgggccccgtccccacccccagtgccaccctgctctgcttctcttcccttgctgtgctctaaaacgagaagtacaagtgagttcccccaaggggtcggccgcgcctcttcctgtccccgccctgccggctgccccaggccagtggagtggcagccccagaactgggaccaccgggggtggtgaggcggcccggcactgggagctgcatctgaggcttagtccctgagctctctgcctgcccagactagctgcacctcctcattccctgcgcccccttcctctccggaagcccccaggatggtgaggtaagggcctgccacccacggtagacaggaggcaagggtgcctggtgcccacgggacccctcctcactgccctgcctgggccgcccaggtggtttcaccgagacctcagtgggctggatgcagagaccctgctcaagggccgaggtgtccacggtagcttcctggctcggcccagtcgcaagaaccagggtgacttctcgctctccgtcaggtaggtgggccccccgcaaccccgggcattttggccactctcttgtgccatccaggccctgaaccactcattcctggttccccgtggcagtgctgactccccgtctgttcccttgcccccaacccccacactccccatccctgtctgtgcccacccatgcccatgtgtgcccccacccaggacctcagccgatccctgccctcctgcctctactcctgcaccgactggcctcaccgcctggtgccctgcagggtgggggatcaggtgacccatattcggatccagaactcaggggatttctatgacctgtatggaggggagaagtttgcgactctgacagagctggtggagtactacactcagcagcagggtgtsstgcaggaccgcgacggcaccatcatccacctcaagtacccgctgaactgctccgatcccactagtgagaggtgagggctccgcacccccgccattcccaagcagggatgagccggctcccaccctgaacagccagggaggcagggagactggcagccggcgctgcctaccctccatcccctcccctccctgcaccrgctggggctctcaatgtccctcctccctgctgtcctgggacctggtgtctcagagcctaacctaccaccctttccacctaaccccgaggaagccacagaaagctgcctcgccctactccgggagccctggccgctgcaacccaggtcccactggagacagggaggccactgctggtggccagcatgtcgtgcaggccagctctgttgttagaaagctcttcttcctctggaatcgagcctgccttcctccgtctgcccctcaccccagcacatgttaggacagtgaggagctgacactggggtgaagatggggatgaatgcttgccaagacacttgatgccttgtcccagccgccccgtggggatgggtctgtcctgtggggtcaaataggtctccggcccaaacagagatcattgagagcacgatgtgaagtgttcacctgtgtaaagtgtctcacgctgtcccgggcacagagtaatactccaggcatttccttcctgtggcctccccgactcctcctgtggtctcccaaaggcatgggctgggggctgggggctctgaatgctcctcatgacaccatggctcctttcagcagccgcatctcaatgccagatccccttagagtaaagggcagcggaataacgctagggggttttcacatgcacccctgggccaagccgacttgcccttgccgtggatccctgcattcatggatcggttattgaaatgatcgggaaccttgctcctgccagcttgcagcctctctgagattcgggcctccaaactgcatcaatatttttggtcaaggcactgattgaaacttagagctggattcggtcacggtgcagccctgtggcccacctgggaggcctcctttcctggatcggcctccttcaaggccttccctctctctgtgagcctcacrtggctggctccgtgtctgccccctgcccttcctcttccccaccgcaacactcagggggcttttggcaccgagaccctctaaagctcatgtcctctctttctccttgcctccagccaggagaggaggacgggctgaccagtgcctggaggtggaagagaggagcagggccccaggaggcccctgcagaggaggctgaggcctgggttcaaggagaagagagaagagagagaaggaagggagggcagtgccggggcgggaggttaagaccagggaagccgcactggaggcccttttgggtgacccgtcccaggagccagtgtcacccctgagcctgggagtgtgtgagaggctctttctcccaggttctgctgtgtcctctgccttgtctgtgcgcctcctcctctgcgagaatttgcatctgtccctcggtggctctgcgcttcctgtggtcagcctgacatttgcatggagacttcctcatcctggggcctgagggaaggggctcagccccctccccgctacctggggtcctagcctgtccccaggcggtgggctgaagtagcccagtggggttaggaggctctgggggtctctcggctggagtcacctccgggcaggggtgagatgggttgggacagactggtcctcccctccttccccccatccctgcggttggaaaatttgcccgccctcccctcgtccctgggctgaggaaacctcacaacctcacttctcactctctccccagaaggagttttgtgttttttccatcacgtggtttcctgtggggctgggctttgtggggctacagtttcctcctgggaaaggggtgtgcttcggggaaagggcttagttctgctttctgccctgacagccccttcaaatccgtttgaaccctgggctccccttcagtgacatcatccagggcaccccagaaccccctacaccactctttccccagtggggttgtcttccccgcctccctggcggagcgcaccccatccgccttccttgtgacttgagtctgtgtgtccatctcccaccactccctgtggtgtggcctcggtctgcgtttctctttgcctctggtctctgctggggcacagtcccatccttcacggagattcatccttagcttctctcctccaaatattttgaatattgccagcctttctgcctttcagaggtgggctctgggttcgaagcccggttagaactctggaggctaggatggcttgaacctgggaggtcgaggctgcagagagctgtaaccgcgccactgcactccagyctgggcaacagagctctggaagcttgccctagagtcagtcaagggccctaggccagtgagtaacagctcagcrtcagtttcctcatctataaaatgggggtaatatcatacctagctctcagcatgtttgtgagagacctaaatgaggtggtggatttggaagcatgtagcgcagtgcctggcacacagtaggtgcttgatttccggcccctctctgtgaatgtctctgctcagcgccttcccctgtggcctgggtcttaccttccctgacgctgccttctctaggtggtaccatggccacatgtctggcgggcaggcagagacgctgctgcaggccaagggcgagccctggacgtttcttgtgcgtgagagcctcagccagcctggagacttcgwgctttctgtgctcagtgaccagcccaaggctggcccaggctccccgctcagggtcacccacatcaaggtcatgtgcgaggtaaggcagccaggcggcgggggagcctctgctgaggctcctgtctgtgaccacagtgtgggtggcagggagggtctgcctgggcttgaattcaaggctggggacccagggagggagactcaagtcctgtgaatggcctmatttggctccccccagggtggacgctacacagtgggtggtttggagaccttcgacagcctcacggacctggtrgagcatttcaagaagacggggattgaggaggcctcaggcgcctttgtctacctgcggcaggtcaggggtgggcccagctgcctccccacttcccctgagctgtcccccagatgtgagcttctgggatctctgagttgctgacttctcgctcttccccaccccagccgtactatgccacgagggtgaatgcggctgacattgagaaccgagtgttggaactgaacaagaagcaggagtccgaggatacagccaaggctggcttctgggaggagtttgaggtgcatggtggggaccggcagggctggggcagctgaggtggtggcagcggcctggggccccaggcggacaccttcccctccttgcccacctctgctcctgacccaccccacgtgagctcccccgatggatgccctctttgggagctgatgctcatttccccacccacatctcagagtttgcagaagcaggaggtgaagaacttgcaccagcgtctggaagggcagcggccagagaacaagggcaagaaccgctacaagaacattctcccctgtgagcacccaggctgccccattcacccaggataccgcccctgccccagctgcctcccctcatctcacaggtctccaccctccacgccaggaggggccatctccccacaccccccacagagcctcccccttctccaaaaggcctctactcctcccagargtgcctccccaccaccagcaggcaggttgccccctgctcccaacctccttgtgaactccctcactccctccatacagatgatcccccacccctgctgcccacagtmccccgcaagcctcatggcttctgagaccagaatggcctgttagctcaggagggtctgacccaggtgtggtgagtccctggctaacccagaccatctygcctcctctccgcccactcccagttgaccacagccgagtgatcctgcagggacgggacagtaacatccccgggtccgactacatcaatgccaactacatcaaggtcagcagtgtgggccacgtgrgaggagaggctgggccctgggaattccctgtctggtggggggaccctagatccagagacagctgggcaaagccgaagctggcttcttgcatgggtgagggtggcagtggttcagggcctgtgctgggccaaggggctcactgtcttggggtgcgtctctccacgcttgcrtccagaaccagctgctaggccctgatgagaacgctaagacctacatcgccagccagggytgtctggaggccacggtcaatgacttctggcagatggcgtggcaggagaacagccgtgtcatcgtcatgaccacccgagaggtggagaaaggccgggtagggcgcccccccttccccgcatccgcccccgtgcttgtggtcatgccattaagtcgaagagcagtcagatgccagggcagaaagggatctcaggggtgagggtccggcccttgttgggaaactgagggctagtgacaaagtctcgactacacaacgtgacccccagatccctgcatgcatccctgggctcttctgagctccagacccaggttccaggctgtcctccttcctcctacccctgccccacctgtctgcatccaggcccctcctgtcctccctgccccatagatctctctggagtctgccccttaccctgcaggctccccctacacagcaccctctgtgctgccattgaagtgatcccatccgtgacacaaactgggtcaagttccttcctttctgaaatctcttccatggctcctggtcacctttgggataaagtcgcactctaaggcctggcattcaaggtctggtggcttccctctgacccgcacgcttctcttgaaggctcaccgcccccagcagccccagctctttcaggttcccagcctttctttgcacaagctcattttctgctaggaaatgactctctccacactatctctgcctggcagatgcctcgtttttgaagacacagccggagcgctgcctcctctgtgaatccaggtcttgtttcctccaggacctagagggagaattacgtctttcccagccacgctcctcagcgcggtgtctcccccggtcacctgtctctgtgagctcctcgaggcacaggggcacagactgggtgttatttgtgtctgtgaagctgtgtggtttgcacagcttcggggacaatgcctgccctggcaacgtttgttgaatgacaaacggatgtaccggtgaagtggctggccaggcctcaccacctgttggtggttgatctgagacgagagcccaggtctcctgcctctctgccagcccatccgtccatccaacaaatgtttgggccggtgccaggcactcagaacatagagcaggayctgggatgggccacagtgccctgctctgtgcctcatccccacccraccctccctttccagaacaaatgcgtcccatactggcccgaggtgggcatgcagcgtgcttatgggccctactctgtgaccaactgcggggagcatgacacaaccgaatacaaactccgtaccttacaggtctccccvctggacaatgtgagtggcccccacgccctgccccattccgggagtccctccctggacttgttctcctctctggtcgggtagggtgagatggatgaggtgttccgagagaggagggggcactgaccctatgtcctcggcttagggagacctgattcgggagatctggcattaccagtacctgagctggcccgaccatggggtccccagtgagcctgggggtgtcctcagcttcctggaccagatcaaccagcggcaggaaagtctgcctcacgcagggcccatcatcrtgcactgcaggtgaggatgataatcctgatggtagtagtgacagctgagaagtaaatactgctaagtgccatgagctgttataagcaatataaacgttagctcgcacattgagtgccctccgctcacccccggcttctcctgggtcccctcatggctccagaaccctgggtggatcgtggctggaaccagccccactttggccctctgcctgtgggtatcttcctcagagccctctccggatgtaccatctcgcccaaccctgccaaatacagaggaggagcccgggacccagttgctggccaggcccaagctagtcagggcaaggccrggcaggcacccacagtaggcctgtgtcccggctgctccgctttctctcgaggtcccattctgttggtttcttctcccaggaacatctatgaggcatgtgctccccattcctcctctttttccatcggtagccgcagggcttcggcttcttcctgactctgccctctctcccagcttccccaggcagtgccccatcctggcccccagggctgtgtggggatgggtgatgcttctttggggctgcacataactcctctgtctatctacccgcatgtttgtgatcaggagacctctggtaaggtgcagaggtgggggctgcaaggaggagcaggggttccacaggtgagcccactgagctggcctggcctgggtggatgagaggcagtgggtgcagggcccctccgcttaccagctgtgtggtcttggacaaattacttaacttttctaaccctcagcttcctcatctgtaaaatcaggatctcagggttgtcgtgagaactcaatgagaccctatcgttgtggctggaattccgtcagccctcaaaaactgggcgctgttactagtttagtaactcacatcaggcagagaataggggaatgggaacctgccttgccccggtcccttcccactccctccgtggaccccaggcctgcgacggcctctggcttcctcctcttcccccagcagctgtttgtcctgggacagggcaagtcggctgaatctagaggtgcccccgatgggctgtccggggacgcggctctgtcctgtgctctctcagggacaggcccatccccgagagctaccctcctgctcacccgccacacacacattcacacacttcttgaaagccccatggcctttatttagacgttacaggaaggaagtgggtgtggggggttatttttgacaatctgggtttgaaattagacagcgcgactcagggcatcagcttgctgggctcagctgagggtgggcctggggtctccctgaggtctgtttgcccagggctgggaaaggagagaaacttcctactgcactgctcccctgagtccyctgaccctgtgcccccgcaccctgctgtctcagggctatcctttccctgacgtcagggtttgaaggaaaagggaagtgaagccatgctgagagacgctccataactccttcagggagaggcggggagggctcagggtacctgggagccggcaggacagtggtgggatttgggggtcccaggtcttccggggtgggggcagccactcactaggagtgaggagtcggcgcgaggagtggaggagggaaggatggtggcagctggggagccagcgtcagcaccgcagagcccgaggtggagcgtgtccatgcagagctgggcaaacctccatcatcacttgcccggtgaccctgggcacattccctcccatcactggaggctcaggctgctcctgtggtgcctggggctggagctgagcgctgggtaccccccttcccggggagggcttgactggcctctgatggcacccccgtctttccccagcgccggcatcggccgcacaggcaccatcattgtcatcgacatgctcatggagaacatctccaccaagggtgaggggcacctgggggtttgggggtggggggtgagcagcccctcggtgtccgcctatgcctggacctgaggtttgactgccccccacccaggcctggactgtgacattgacatccagaagaccatccagatggtgcgggcgcagcgctcgggcatggtgcagacggaggcgcagtacaagttcatctacgtggccatcgcccagttcattgaaaccactaagaagaagctggaggtcctgcaggtgcgtgcagagcagggcctggsgggggggggggctgcagtgcaggatgggtgccacctggccctgctgggaccaccaccttcccactgtccctctgcccacagtcgcagaagggccaggagtcggagtacgggaacatcacctatcccccagccatgaagaatgcccatgccaaggcctcccgcacctcgtccaagtgagtggccctgactgccacygcccggcatccacccctttgtcctgcccagcccratcctcactttctggagaggacaagtgttgcagctggggggacctggcttcaagttcaggcttggttctcaccccttctgttcataagcatttcctgagtgcccacacgtgtgggcctctgctaggtaccagcagcgcactcgtgtatgagatgtagcctctgtcctctaggagcttggagtctagtgcagggaccgtggctgcgtcacctgtgagacggggtggccagaggggactgccagtgccgggtccccctgtgctgtctcctgacctgcaccaactgcctgtacttgcccccctgcacccggctgcagacacaaggaggatgtgtatgagaacctgcacactaagaacaagagggaggagaaagtgaagaagcagcggtcagcagacaaggagaagagcaagggttccctcaagaggaagtgagcrgtgctgtcctcaggtggccatggtacagctcttctgcctgggtgtcctccctgccctgccctgtgtccttggctccactgccttccctgggtggatggggtggccgcagcctcattctgtgcttcccagctgccccagaccctcttgttccacctccaggttccagctaccctctcactccctcactcccttctcttggcagcctcagccctgaccctgtggaagcatttcgcgatggacagactcacaacctgaacctaggagtgccccattcttttgtaatttaaatggctgcatcccccccacctctccctgaccctgtatatakcccagccaggccccaggcagggccaacccttctcctcttgtaaataaagccctgggatcactgtgtgtcgcctctgagccctttgcttgcccagtgagtgggcggccagagggcagggcaggatgggtaactgtgtgtgcctccgtgcgtgcctcgcgtgaaagctccgccttccgtcagacggacgtgggtcgggactccgcctcgcacgtgggagggtgaccgtgggtgaagctccccagtctccttctttaaaatggagggcgatcataacagggtggttgtgaaaagcaccgagatgacggctgacgataagacgggcacagtgactcatcacacgcttgccatgtgcccaggcactaaaagactacacacgttagttcagtctaggcacttctgtcattctcattttaccgtggcggaaactgagggacagaaaaactaagtaacttggtcacttgcccaaggtcacagggctatggaacagtgaggctgggattcgaacccaggctgtctgaccccagagcccacactccttaccctggagttgcagctggggccaccctcaggggggccctgatcacactcccctgatgctgagttccagatctgaactaagaagagtagttaacagccggaagcgcagacctgaggccagcccggctgcgtcccctctggcgggaacagggacaggctcctcagagcacccgggcacgcccagctcctcccctcatccaggccgctgctgcccttatcctcttgggcagagtttgaagagctggctgacgtgaagagtgctttgttttttgtcccctcttccttcccccatgtcaggagtggggtttcttctttatttgaaacactggtgtcctggggagtaaagccggtgggagtcatccctcaggaagtgctggcgcccactcctggaaaggctgagacagcacaggtcccaaagcccagaggctgggcgtgcattactcagcaaatccttacagagcccccggcgtcacaggcattcacagtcccccgacctcctggaacttaggaggctggtcagggagacagattcacaaaccgatcacaagcatcaaataattgcaggcgggtattaagaaggaagcaaacaaagcctgggagagagaacagcgagggattgagcaacccaatagctccctggggctgtggccctccagggcacgggtggggcaatcacctgtcgggcccaggtcccctctcccagcaacgccctttctatacaagccgcagctgcacaaaggcaagtcccacctcctytaaccgcccttgggctacctgcccttggggtgggacttggactccactgagggctgtgctgtgaggtgggtccgggagcagctcggtccggagagtggagcgcgatcgttccctctgcaggcctcaatcgaggggcaaggctgatgctccgggccagctggggtctctgggtagcggtgggtaacttcacactagcgacaccttgctgggacccgcctgcccttcacaggcctggcggggccttctccctcccctttccctcaggggatcccagcacaggctgggcactgcggggcggcacagcccaactcctgcccagctgacccctcgctgacctcagggatctctctggcctgccagctccgctgtgggcagggtctgaggccacagaggaatgggctagtcctgggggcagcatctgctgtggggaggggacccaaggacagcccccgctttttgtacctctggagacaggggtgagactaggcaggttggagaaaagaggcccctgggagagggtgggaggcctagaggagtggccaagccttagaggaggtgcccgtggctggcgctgggagggaaggggttaaggcagtgggggggcagcctatggcaggaggacacacctgtgcgcagggtggcaggcggggcccaggtaaggagcctgcgctggctgcccggcaggcggagaaggaaggaggaagagcggaggccagggcgggctctaggccgtggaatctggggccttaaagccccttcgtctccccagcacccactctctgggggcaggtgggcccggtgacaggtaaaggccaccaggggagaggtcctgggctgagcttgggactgcagaggggggatgagggtgggtaaatcggtgtgtgtcgcgggtcgggaaaggctgccgggggtaggggaaggtggctcagaggcggcgggccgacggtcgaggggcttcggagggcctgcttggactgcaacctgggcctcgtgatcagcgacccagggtgtggctggtggcgggcagcagggctcaccaggaagtgtccccagggactcgggtggtggggggatgggagccagggatctgcagcttttccgcagggatcctgggcctgaagctgcctgacccaaggtgggcgggctgggcgggggccctcgtcttacccagcagtgtttgggtgcggttgggagtctctaatactgccgggtaatgatggaggcccctgtccctgtgtcagcaacatccatcgcctcaggtccccagcccttagctggctgcagccccctccccacttcccacgcaccccggaagcccctcgtcttgagctgagagcgttgcacaaggggtggttcttgttggctggctgccactaagggacacaatgggccccagcccctcctcccacccagtgcgatttgtcacctggtggatccagaacccacagtcgaccttgagcttggggttggctcgccccctctcaagagacctcacctggcctgtggccagggtcccctgtagcaactggtgagcgcgcaccgtagttctctgtcggccggccctgggtccatcttccagtacagtgttggatggtctaattgtgaagctcctaacactgtctggtaaagatggctcccgggtgggttctctcggcagtaaccttcagggagccctgaagaccatggaggactactgaccaacaacctctgaccttcacccctctggatgggggacgaatcactaggcaaaggggaacaatgggaaggagacaaaatggctgcctttacagctgcagcaagatgtggaaacactggttccctaggcacctccattgtcttcccgccttgggagcatgaaataaataaagtgtgaaggggaacatgaggaagactgatccaagtcacttgacctgtcttttgtctagttgtttatctcatcttagcctcccagcaactcaggattggggctgcgacgtctgctttgtctttcatgatactcaaccccaagcagagaaaaatatcttaaaaatcgaagcagattaacccagtccctctgttcagatccacctgctgccctatctgcatttggcagttcctggacatactttgcacctatgttttgtctgagttccacatcttccttgtctccccgcagggatgggaaatgggcagtagtgggagattcaggtataaacggtggctctgtttctctggtgcctgagattcgggaaggcctgtcttgggaagataagtgtcagcttatctgtggactgaacagacaggcacctgttctgttggccccggaactgcgggcatgaaaagcccacctccccaggggaggcctgttagctagcagctcctcacgcctggtgactgagaaatggagtctggggggcctacagcaggccacgcgatccactgggcttctgggcacagaagtgcctcaacaggcacaggcaggctccccacagccacaaggaaccctgctgccaaggaagcagctcctgttggggtcatcagatttttaatctggctcagcaaagccatggctgtccagccttaaaaaaatgggtgatgtgggagaaatggagggtgtgtgaagagcacagctgggcctsgagaactcagggccagccttcccagcttgggtcctgtttcggagcccaggccttgcttccccttagccgccccagccagattcttttgcgccccctgctggcacacacaaagacagacccaggagcgcacatgtgaacgtgcgcatgcttgctgccagttacccagttcatgaacacgtgaagccttgacttcaggttaagtaataaaaatttattgagaattcctgggttggtgtttatctcctcccagccttgagggagggaacaacactgtaggaaatcactgaraaatcacgcactgtccccaacagccccagttaacacagggaggaggaaagtaattccccaraaaaggggctagtcttcagtyttccttaatccaagaggggttcagggaaccggtgtgggggaccatcgcatgatactggggcggggtagggctgtgctggacccctggctggctcctcaaaaactggagaagcagatccacttcctctgggggtggagttcttggtgactaggctcatttcttacccttgatgaggctgtcactgtaggaaaaaaaagatagataatgacattattaggggacataaatgtgagaggcaggacactctaggccattccctctacgaccctcctaccctgattgagggtttgtcttcggggaggtgggaaagggggtagggtaggaggcgggtactggagaaggtggcctgcaggaccccacagaagcaacaacagcttaccttcccctgtggtgccagatcgccagatgaacaagaaacagagaagagaaatgcacatgttaattgacagcttcaggccccactcagctttgaaccctcctttgctcccaagagaaaagataaacagggttgacagccaggaatctcaggctcatgaaaggaggaggcatgttctcatggccactgctatttctcatctcctttcctaacatccctccattcaccagaggagtttgagggctcttgagtaagaaaactgagtatcatctttcatcactttttggttagatgaaaactttataattaaagtgctttttatgtgaataatcctatttgatctcataaaatcaatcctatgagatgcaagatagaaactgtcaaccacccccttttctaattttggttcaatgtctctgagccatatgaatagctgtagcaggctccagagcccaaacaaccagactcaggtcccacgttcttggtgataccccacagtgtggccacatctctcacctggtgaaactttcatcctgtaggttcagcacaaggttgtcagcygtgagatagatacgattctgtgatgtggcgatctacagggcaggaaataagacagatgcttgcattaagcaaagacctcaattccgacccctgcaattcagcagctacttaacatggaacacatgcagattagggcaggggtgcagcaatgagtaacacatggtttctgctcgcacttagggatccagagcgctgagcagcagctatgattagaacaaaaggtcagggaacccagaggaatcattcttgacaggaggagtatcggagaagccaattttttatttatttatttttgagacggagtcttgctctgttgctcaggctggagtgcagtggcatgatctcagctcactgcaacttccgcctcctgggttcaagtgattctcctgcctcagcctcctgcgtagctgggaatatagctaaacgccaccacagcgggctcattatcttttgtatttttagtagagatggggtttcaccatgttggccaggctggtctcgaactcctgacctcaggtgatccacccaccttggcctcccaaagtgcggggattacatgcgtgagccaccgcgccggccagagaagccaatctgagtagaaaccggaacaagcaaggttcgaattccctcacctcaatgtgccttaactgaaagcactttctcaaggcagccccatcagagacgctgggctgacacactcaccgtcttggagatattctgggctgctcgaatcttgcgaagtttgatgtagccagggttcttgctcagtgcttctccaaggtgaggagggttaaggtacacgcaagggcaggtctcaatccctggccctgtccttaccacactcccttgct

SEQ ID NO: 95294 - DNA, 35927 bp, Homo sapiens
  misc_feature (1)...(35927): n = A,T,C or G
catccagcagtggtcaggatgtgtacagtctctgagggtattagttttctattgctgctgtaataaattaccacaaacttaatcgcttaaaaccacatgagtttatcatcttacagttctgaaggtcaggatcctgccatcggtttcactaagctaaaatcaaggtgccagcaagcttgtatttattctgaagccccaagaagagaatgtatttccttgccttttcaaacgtctagaagtcatctgcataccttggctggtggcctttccctgcaccttcaaatcagcagcagagtcatcatgtcaccttcactgactaaccttcctgcctttctcttataaagacccttgtgattctattagacccactcagatgttctaggataatcaccctatttcaaggtccttaaggtaatcaaatctgtaatgtcctttttcctatttaaagaaacgtagtcacaggttctaaagtttagtatgtagatatctttagcagggagagcgtctattcagtctggcaccctgggcttagccttcatttgttaaaagaccaggaagctctcttcatatataagcccataagagatactgtcctttgggtgttatacgggctaccaatgaactcttaaagtgaaaaatgccactgtctgaccactgccaccatcactgtcaccaacaagcaacatttgggcataaactttgtgaaacccaattcctgttgccagcaactaacatccacaagggcatagacaggcaatgtttatgttcaaacccttcagcaacattgtcttaagataatttccaaatgagatagcatcagaacagatatccaggagcagccaggcacacagtagatgctcaataaaagccaggagtttggaggttttctcataatcttcattaatcagtgagttgagggttctgatatgctttttggttatactactttggtaggtttgccaggccagatccagttatatcacaataatcaagcatgccaatgtcttgggctgcccgacaacaatgttgagaggctctgataaagaccactgcaccagggtagatctctttatcttcagctctataaatgaaaataatctgttaatgcactggggcttagccattgtttggcactgacctatgagaggaggttgcccctgcactgcctttctctcctcccagctgtgtcttataagctgctgtcaccttaaccacaggttgtccagagaaacaaaaactctcctcccagaggattatgatccttccacctgcacaccagagacttagggctaccatggcatagatgcttccaaaagaaaagaagaaaggaactgactttctggcagatacagaactgagtctctgtgaaggagttaacggcctttctggatcaataataccattctctggtaaggaaacaatgcatctggtaacatggaggtgactctagtaaatgagaagttgggaaagtaccacagtagtaagagaaaaggcacgttggccgggggcactggctcacgcctgtaatcccagcactttgggaggctgaggtgggaggactgcttgagctcaggagcttgagaccagcctgggcaacatagtgagacaaaaaattaacaaattagccaggcatgatggcacatgcctgtggtcgcagctattcaggaggtggaggcgagaggaccacttgaacctgggaggtccaggctccagtgagctacgatcatcactgcactccagcctgggtgacagagtgagatgctgttcccccaccaaaaaaaaaaaaaaaaaaaaaagagagagagagaaagaaagaggagcattatcttgctgtaattggataactgcagacccaaccctagcaaactgtcctctgataggaaaataaaatgttctcttactttattaaggttgatagaaatgtagcaaaaacctggtagcatttccttgtatagctttggagacaacgaaggtgggctggaatttctgctgcttgctagatggatggctttttgataagttgcttacctctctgtacytcagtgaccttatgcatgaaacaataaatcgtatatacagaaaataaaatgcctgcttcctagcactgttgacatatattatatggaagtatttaacatgaccacacaccaattggtcaatcattgtttttcactgttaaggtttcccttaacactctagaaatcactaaaattttttaaatcatctggtttgacccttaattttacagatattttctggagacattttgttacattaatttatatacaaatttcaacaaagataatgttttgatttaaaatagtcagtgattgtcagatttgaccctggaatcatgagctttccacaaaaccctacatcaggaaatggttctgttcaatgcaaaatggcagcttttcagagttttgtgatctccttaaagatctattcacaccaaatccaatctggaaatcaaaagcagatcaaagagataaaaaagaagtaatgttggcaaacagattttaaagtttaattgaaaaattatactttataatatcttaatttatattttgttggcaaaaagatcttaaagtttaattgaaaaattctactttataatatctgaatttatattttattactaactaatcattaggtttgcatatgcaatatctttcactctgtttatatatacaacacaggaaatgctgaaatgtatattcagatctgatctgtttacatttagttttagatttgttggtatgttaattgggtgttttattatgatttagaaaatttgtccatggaagcaaggaataaaagagcaattcataaaaaatcatttttcaattcagaggggatggagaggagatttgcattaaaaactatccactatattctctgcactatttttcttaggaagcaagaatgttccaggttcccccatcttggaagtttttccacttcatcattaaactgagaccaagaaaggacaagataatggaagtgaaagctaaactgcttcagactgatggaggctcaggtcagccccaagagcttggagcacagtgacaggacattataagaggcagaaacaagataacttagcagctccaatccaatagcttttctttgctgttgttgttgtttgagacggagtctcactctgtcaccccggctggggtgcactggtgcaatcttgtttcactgcaacctctgcctcccacgttcaagcgagtctcctgcctcagctttctgagtagctgggattacaggaacgcagcaccacgcccagctaatttttgtacttttagtagaaatggggtttcaccatgttggccaggctggtctcgaactcctgacctcaagtgatctggccacctcggcctcccaaaatgctgggattataggtgtgagccactacatctggccttccaaaccaacagcttttctaggtttctttatatatcaagagctgaagtcttctgtcacaaatgcttctgaggttttatttttaatatgcagcatttattcattcctagccacaaaccatgcactgtgctaacgtactcactaaaaccttgcaactacctagtgaagaaggtattattactctcattgcacagatgcaaatgagacttggagatgttaagcaacttgacaaaggtcatccagagaagcaagtttggatgcaagtgtggtgcaagtggtatgtgtgtgtgtgtgcatgtgtgtgtgcacgtctgtgttttaggagagggatgagagtctcacttttggcagaatgctaaaccatgaatgtggtccactctgcttctcttttctcccttttctttactcttgataattgcccagttaaggcgctatccctcttctttttttaccttggcataacagagagtttaacaccaacggtattgccagcaatagctatttttgaaatacagcaaattgtgtttgcaccaaatggacctgccacttatccagaagtcactctgagcagcacagaggacttggcaacaacaatgaaggatggcacaccctgcaccctcctttctattgtttgttatcaccatgctgcagactcaggtactctttacatttgcagattcttccactccattcaaaacaactacacaagcctgaaaggcaaaaagggtgaaggcattcaccatcaacaagaaacctttatcgaagaaggcagcacaagggagaataaatagcagagaagctgagtaggttaagttctgaagtcagaccagagaggttcaaaccttgcctctggttgcgtcattgagctcatggtggcagaggcaagacatggtttgtctcgagctgaatgaccttggataagatccttaagtgtacttaaacctcagtgtcttcatctgtaagatagagataataatagcaccaacctcacaagcttgtcatgaatattgaatgacatcagaaatgcaaagtgcctgcctacatcaagaacctaaaaactgccttttattattgcagatcttctgtgagtcatgcttagtgctaagaacacattacatagcctcaacccataccggctgggtagggagacagggcacatatatgaaaaactatcattgataatacaaggtagacaactgtcacatgaatagcataaatgcatgttacggaaaacccagggaagaaataaacacaaaattatttaaaaaattaattagattacagatggtagtccagaaagagcaggcaattttaccaatattaaaagcagtttttgaaaaagaaataaaatccaagtcttctggttcatatggtaggattttttaaaataaaactatgccacaataatattaaggaaaataatcttaacaacagcagtggttgcctgggtgcagtggctcatacctacaatcccagcactttgggaggccaaggcaggaagattacttgaggctaggagttggaggcaagccagcctgggtgacatagtgaggccatatctctacaaaaaaaaaaaaaaaaaaattagctaggcatggtggtgtggcccctgtagtcctagatgctcaggatgcttagtcagggggattgcttaagcctaggagtttgaggcttcagtaagctgtgattgcgccaacctgggtgaaagagcaagaccttgtttcttaataaacaacaaacaaacagaaaaacaaaaaaacaacagtagtaattaacactttgaagtcaccttttacgagctaggcattttatacacattatcttattaaatcctcacaataactgtaggagggaggtactatattttcccctattttacagatgagaaaattgaggtgcaggaagataagtaacttgtccaaagtcctacagccggaaagtggctgaaccaggacttaaacccaggtttccaagcaatcacaatgggaagttgaaggggagaggagaacagggtaagcaggagccagggaaatgacaggccaactcttagtggggcattcatggcaagttaacgggcctcctttactggaagaggaaattcaagtagaggagttagcagacacagaacagtgtataaagcaggcgaaaggaggctctgaatgccagtccagacagcgaagtttctatttgtctgttgtttggttggggagaagacaggaacagaagacaggagtctgacaattctgtagttaaggggtttttttagactcatctggtcacagacagaatgaagaggaagggtccagtggcagggagaccagtcagtggctaaggcagcagctctgaggaaggatgaggtgtttttcaggtgttccccaacttgccagggacacacagccacaaatccacctcccagtctcaccacagagcatcaagaaactgatactctctatccatctctccctacaggctgtagtacttctgtgtccatagcagtagacaaagtcctttgggaaccatgaagatttttttccgctaccagacatttagattcatctggctcaccaagccacctggccggcgcttacacaaagatcaccagctttggacgcctctgactcttgctgactttgaagccataaatcgctgtaacaggccattgcctaaaaactttaactttgctgcagatgtgctggaccagtggtcccaaaaggagaaggtatatgacgatgggcttccagtagatgcttggtgtccccttatctctcagtcttccatttccytgttctgtggtctaccacttaattycaatgcactctctcaccctcttggtttcctttgtttgttttccaattgccctcccctctccccagggaagatcttagatcctcagccacaaatggctgggcggctctggagccttctctatctcccatccccatggtcgttcctcacagagttctgcctcttttccttctcttttctccaagccccatgcaacagtgctttgttttcaagttggtcacaggcttatcgaaaaagtagcaaattgagttttgattttatgaatacagttatcattggagtaatgaggagagaattggaggttgacaagaataaagcaagcggcccttatgcaatgtttacagtgcagcctcaggatgaggtctctgtgtactgatcctcaccccatgccaggcactgagctaaacacttaaccaagcagtgcttatcaaaatgcactgcaggaccatggatgggaacatgatgttaggtactagacagacaaggtattaaataacattgaatcaattcttcctgttaaatacagggggaaagccttccttgaaagccattgtgtctttagcacctatcatttgctaaacactctcttgaataaagaccacaggtagaagctaatcatctctagataaaatttaatggcatagttttgttttcagcatatttatttttcaataacctattttttggcaagtggtaataattgtccaataatggtgctgattaaatatatattccttcttaagtaaatgtatacacgtaaaaagtaaaaagtgagtccatgtagcgaagtatacaaaataaagaagaatagtgcaggtgcaggcagagctgacagaaacaatgakacttaaatgactaaagattgagaaatactgacctatattatttcaccaaatccccataacaacctgggaggtttgcagatgaggaacttgacctcatagaagctaagctacttatccaaggccacacaggtccaacagaacataaacccagtccctgatctttacagaggttacatccacagggaagagacacatctgtcatataataaattggagtcatctggagtatgagcacaacgatgaaggaacacagagaagttagtggagaaacaaagagaagtctaagaaaagctcacagacgaactgacatgtcaacagggctttaaagtatttgccagccagagaagataaaagaagcattccagataggggaaagaagggagagtaatttttttccaggtaatacataaggcaaagaggttttgcagtacagatgactcactttatagaatgatggggaagaagttacctctagaagtcaataaattgatgcctccctcgaccctgctccttgtgacttgtgaaaaccacacctcagccttagggtacaaagagatgtctgcttcccagtcaaacttagcagatccattcaggttatttggatgggaaagaatctaatttaagcaagaaagaaatttattcaaggaatatgggagagctcacaaaattgggctggaagctggagagtccatctcaatgaggacaggaatcaggacagctctctgagcatgcgtaagcacgaataacccatagacaagttttgtaccaaccattttctatcttttgatttctctcagaaaaccaaaaagtccagagagagaaggtctgattggcccaactttggtcaaatgcccacctactgctcggggaagggtaaaagcaacctgagggattctcttttcaaggctgtgttcaataggagaggggcagttccctcaaagacgaactcagggcgctgttagcagaatgcaccagaaccagtgccaaagggggaaaacagcagatgccgcatgtaagagtaatcagtcatgtaaacctacccctctcttttccatgtgtccctggtcagacaggggagagaccagctaacccagccctgtggtgggtgaatggcaaaggggatgaggtaaaatggagcttcagagaactgggctccttgtcccgaaaagctgccaacgtgctcaccaagccctgtggcctgcagagaggagaccgtttggccgtgattctgcccagaatccctgagtggtggctggtcaatgtagcttgcatacgaacaggtcagtgccaatattagcattctaaatcacacaaacacagagagactgaaactcaatggttttctgaattgttagctctgattaaaagtatgcatacagaagacaaaaaaaaaaaaaaaagaagagttaaggcaatcatgatataataataacaataacaccaagagggaggtattagtgtgataaccattttgcagaagaggaaaccaaggctcaggttaagaagcttgccgggcgtggtggctcacgcctgtaagcccagtactttgggagaacgaagcaggtggatcacgaagtcaggagttccagaccagtctggccaacatactgaaaccccgtctctactaaaaacacaaaaaattacccagttgtggtggtgtgtgcctgtaatcccagctactcgggaggctgaggcaggagaatcgcgtgaacccgggaggtggaggtttcagtgagctgagatcttgccattgcactccagcctgggcaacagtgcaggactctgtctcaaaaacaaacaaacaaacaaaagcttgccaaaaatcacaattagaaagctattctattcagtcacagctagaaagctatgcaattgggatttaaaaacaaagctctataaaagcaaatttgggtaccaacatctctttgcagtgctagattatctaggacatgttcatccagatgatccagataacttctctgaatatatttggattctccctaacaaaaaaaagatacaacaagaagaaaaagtatttatacatcaggacttataagaatatgattggcacatcccagttgaaaaatctctacctttatttcagactaactagtatattcaatgacacactttctccccaagtagtaatttataatttaccccaaataaaaattccaacaggattttgttccactctaggacaggagttagcaagccatggtctgttggttgggcatctatttacataagtaattttaatggaatacagccatgctcatttatttatacaccgtctatggctccctttgtttcacaacagcagaaatcctcattgagatggagatactatggcctgcaaagcctaaaatatttgctatctgggcctttattgaaaagttttccaattcctgctctaaaacatggcataaatgtttataagtcaattaagaataaataatatcaaaggatagaatatggtaaaaatcacgaagatgtttgttgcaatgttattaatagtaatagaaatttggaaacaactaaatagaaatgactgaattataataggtgagactaagcttagttgaggtgtgtgtgtataagtgattaaaattatggtaattcaacttgaaataccactaaaatgataattacaaggatttcataatgctgttgaagatgatctttctgccaatattgaataaaaacagcattatataaaattcgtttatataaaattctttttgcattcactaaaaacaacttgcaaatgttaaaccagttgtggattgagagtagattaaaggtgatttgttataaaaaatatgtaatattgcttaacatgttatgaaatgtataaaataatagtgaaaactggacaagctgaaaggctaacataaaacactaaattaaatgtaaagcaaggaggtgagattatattttctaactcagaattattaaatcttcaatgagaatattgaaattgtttgtactatatcacatagcaaaatattttgttttcttgctgtaaagtgtatgcagtaaagcctgagatatatgctatctgaaatccactagaagaaaacttctcctaaccctgaatttagaggtctacccattgagtacattcatatcaccaatctaccaagggagctaattatttgtaagtcattaagaacaagtggtttgtaaaataaataatcttaaatttttatattgagcgaatactctaagatgttttcttaatcaacttccttatccttatgcatttattcactttctcaagaagggatgatatttaaaagcttttaaaatatattcataaaataaaatctccttcctagcaattcaactccacatttttgtatttagcaaacttcagggaactcaccaagaaatgagtagtttggcttatagcacaggtcttggaagtgtgggaaatgtnnnnnnnnnnnnnnnnnnnntctatcctttgccacttattgactttgtgacccttgggcaagttattatttatatactgggattaattttaagtgagataccaggcacgtaataagtgctcaataaacagtagtgattatctgtatcactttatatacacttcacttcttgttcccaataattcactttagaaagtacaaacttctctctttaatctaattcggccatgtatgttcttcccagaatgaactggtactttaaaatcagacatctccagccagtgtttaggatgaaatgagraggtgagataaactaagcattgccaaagtagtctaggcaaaccttgatgatgccagaccactggaatccatagagaagagggctggctctgccactcaccagctctgaccaaatctcacattccgtcaatgggcacaaccacatggacctaccagggttgcttaaaacagtagtctctaggcatttttgactgtataatctatcaataaaaatatttaggatacacatcttcccatctgggtatagctacttatgtgcttctactgcactaatacagtatgcatattatgaaacatacaaaaatgagataaaagcattaaaagaattgtagtttctcaataatttctagttctttaaaatttttaatattattttaaaaattaaacagggacggaatctcactatgttgcccaggctggtctcaaactcctgggctcaagtgaccctcctgccttggccaccgaatgcactgggattacaggtgtgagccaccatgcccaaccaataatttttcgaatttctattttcatttcttagtcccaatggattgttgaaaaactcactttggaggccactggtttttttctcttgtttgtttgtttgagacagagtctcactctgtcaccaaggctagaatacagtggtatgatcttggctcactgcagcttccatctccagggttcaagtgattctcctgcctaggcctcctgagtagctgggactataggcgtgcgccaccacacctggctaatttttgtatttttagtacagacagggtttcgccatgttgctcggggtggtctcgaactcctgggcttgattaagtaatctactggcctcgcctcccaaagtgctgggattacaggcccaagccaccgcgcctggcaggagaccattggtttagagaattgaatgagacagtgctcatgaaatgtgttataagctgtaaagtgctatttaagtagtacacaataatgattcaaacgtgacattaaaatgttacatagtaatggcccaccattataatgtctgctcagacacttactgttgttattcccattttacagataaggaaagaaaggcacagagagatcaaggtcataaagcttgtaaattgcaagggcaggattagacccatggtctgtcaaactctgaagctagtgctccaagggatctctcagggatcagggtcctgtgcaatatccttgggcatcaaggcagaggtagctgaggtagctgaagaatggattgtgatgcttctcctcaccgaggcacaaagcccaagtcttccacaatggacagcagttctgttcagtgcagggccctytgtccttcccagggatcatcttcatgccgggaacaatccagctgacagcaaaagacatcctctaccggctgcgagcatccaaggccaagtgcattgtggccagtgaggaggtggccccwgcggtggagtccattgtattggagtgtcctgaccttaagacaaaactcctggtgtctccacaaagctggaatgggtggctcagcttccaggagttatttcagtgagtatttttcccagccaatctacactgctggcaacaacacaaattatagctayatcttggaatctctttgcctccaaggactcaggaacactgtcagttgatctgggctcttactcagaaaagaattacctaatagctgggtgcggtggctcacacctgtaatcccagcactttgggaggctgaggtgggtggatcacttgaggtcaggagtttgagaccagcctggccaacgtagtgaaaccccgtctctactaaaaatacaaaaattagctgggcgtggtgatgcctgcctgtaatcctaattactcaggaggctgaggcaggagaattgcttgaacttgggaggcagaagttgcagtgagccgagtttataccactgcactccagtctaggtggcagagtgaaactttgtctcaaaaaaataaataaataaataaataaaataaaagaaaagaaaaakaaaagtattacctaataaatgaatttaagggcagaagaaaggcacgtagctctgcctcccctctcctgctctctactgtggcctatgatgagtatcctgtgtggtctggcccttgcttaaacctggaccacatctcccaccactctcccttttcttcctcaaacatgccctacctccgctcctgttatttcttctgcctggagtgctcttcttattccttttcacgagtggctccttcttgtcatattttgactcagtattttatcctaagaagttttccttgaccacactacctagaatagaactacaagccactctattacaacgtcctcctgttttcttcatatcactcgtcaccacctgaattatcatgcccattcatccattcccttatgtagagtcctttttctcctctagagtagggtttggcaaattcaggcccacaggccaaatctggcctgccaccttttttgttgttgttgttgttgttttttttctgagacagggtctcactttgtcacccaggctagagtacagtggtgtgatctcagctcactgcaacctccacctccgggttaaagtgatcctcccacctgagcctcctgagtagctgggattacaggcacctgccaccacccctggctcatttttgtatttttagtagaaagggagttacaccatgttggttagactggtctcgaactcctgacctcaaagtgatccgccaacctcagcctcccaaagtgctgggattacaggcatgagccactatgctcagctctgtttttgtaaataaagttttattggaatgcatccatgctcatttttcacatgttgtctatgtaacaacagcagagtggagtagttacaacagaaactgtatggcccacaaagcctaagctacttgctatctgcccctttacagaaaamgtttggcaacccctgccctaaaccataagttctaagaaagcagagactttgtttggttgatcttcctgtctccagttcctaacacataaatggtgcttaatatttataaatgaatgaacaaaagagatcacaactgcagttttcctcatawgtaaaatgggaataattatactgtacttatctcaagtgttgttttgagggtaaattaaatgaatatgtgagaaagtgtttttcaagctgtgaaaaaatgagtgaagtgttaattaatggcattatctttcaaagaggtgttgaatagcttatgtttaaaaaaaaaattcttccagagaagtttatagaaagagaagacatgcaaaccctgctgaataatagggtagttttacttgtgagaatgaaattttatcctactaattaatataaaccaaatactactggccaatcccaagggccacaccagtgaatactgcttgtgtcttttataagctgtgtaaccttggataagtgaggtaacattgctgaaactctttatcttatccataagatggagatgatgatagtatctacctcatggggttgcagaagtatcaaatgtgataaaacatgtacaattcttagcttaatgcctggcacagagtaattactccataaatatctagtaattataactgctatcattattattttcaagttaacaaagtcattcaatagtgtagtgattcctaagttaatggtatttatattatttgaatatgcatctccactagtaacatactttttaacatacccccaatacatgcatttatttgtaaattatatacatgtacttttgtgcattatacaaataccaaaaataaaaattttagaggataagtaaaacgatacaattgtgccactgcactctagcctgagtgacagagaccctgtctaaaaaacaaaaaacatgtaatttgcaattcttcttttttcttctctaccctagttgccttgcacactccctgagcagcaagcacttccacttcagagactcctgtcctaaacaactttgcaataatctattgagtccccaagaaactgtaaagataccacaaaatttacaacggataaaggactttaaattcatatggatttcaaattgaaatttgcacactttgggagtggttttcaagatggaaaaaatccttatttaaacaaatgactttggagtgtcataactccaaaaaggccatggactgtttctctaaaaactagggaagggatagccgtctcattgccaacagttggctagtttttcggaagactacacacagcaataatgtgggctaattttacattgttagagttgatcttttattcaataagttcattttaaggcttcttgccctccttctgcctcccaagtatagaagtccattaacactttccagaatattcataataggataatggaaaaggtcaaaattataagccagactgatatttctctttttctgtcctagtacaaaggaccgtgtcctgtggggtccaggactctggattctgatcatgaggggttcaagatggtgttccaagcacgggaacagcatgaccaaagataaggaaggaaaaaaaataccctaaggtgtgcagggaatggactacaggcagtttggtttagctagagaataaaattatggagtcagagtgaagcctggaagagcaaacagaggccagggtatgggagatctcacatgccatgctaaatcttaaaattgaccctgtaagcaagggaagccattgatgggttttaagaagggaagtgccaaggtcaggtttggattttaaatagatttatctggcaaatatgtagaggattagtttgagaagaacaaactggaatcagagaggccatttttgagcctcatctagggcagagataataaaaaactaaatctgagctctgatgaataggacggaggaaagaaaacaaactaaacaactagcaggacttggagagtattggatgtagaagatgaaggaagaaggagtcaaggctgagctgcttttgacttaggtgattggtaggtgggtaccatcagttggagaaagagccagtagatgaggttaacataataagtttagagttggacatacaagattgaagggtctgtgaacattcaaatgtctagcaggtagtaggtacatgagtctcagggacaagaggcaaagatacaaagcaagaagttattagtatataattagctctgaaatctagaaaggcataactcggaactcaggtattcaaggaaaggaagtcagataatggaatcactgcttgaaaatcttcctgtcactcacagattgtgatgctttttcttttagatagacagatagatggacagatgaaagattgataagtaggtaggtaggtagataggtagataggtggatggatgaatagatagatgaaagataggtaggtagayagatgatagatagatagatadatagacagatagatagatgatagatagagagatagatgccttctatcaaaaggtttccatactggattgagaaatgtttaaacataagaggtctccccacaggtattagattctgtgaagaaatacccctctgtagcccaacacatatcaacttcactgtatacatacactgaaaagaaaatcaatatagttgaatgaatgatctttttctattttaaggggaggaagcaagttaccaagaaaaccatgttaatattttatgaaactatttttaaataatcctcactgttggctggagatggtggctcatgcctgtaatcccagyactttgggatcccaaggcaggcagatcacataagatcaggagttcaagaccagtctggctgacatggtgaaacctcatctctactaaaaatacaaaaattagctgggcatgggggcacatgcctgtagtctcagctactagggaggctgaggtgggaggattgcttgaacctgggaggtggaggttgcagtgagccgagattatgccactgcactccagcttgcatggcagagtaaaactccgtctcaaaaaaaaaaaaaaaaatcctcactgtttttaccatttcaatgacaatgtcactcattcaccatcaagattaattaaaacagcatccttaaccctgttcccttcaaccagagaaattaaaaatatgatacaccagccaggtgtggtggcttacgcctgtaatcccagcactttgagaggctgaggcgggtggatcacctgagatcaggaggtcgagaccagcctcgccaacatggtagcaccccatctgtactaaaaatataaaaattagccgggtgtcgtggtgcattgtctgtagtctcagctacttgggaggctgaggcaggagaattgcttgaatctgggaggtagaggttgtagggaggcgtgatcatgacactgcactccagcctgggcgacagagtgagactccattgcaaaaaataaaaaaataaataaaaataaaaatatgatacaccagtctcaaaaattctcagatactgtaccggttattcatcattgagtaacaaaccatcccagcacttagtggtgtaaacagtagttattttatttgctcatgagtccatgggtcagaaattcgcacagggctcagcagaggcagcagtctctgctccacatcagcctgactggggctcaagtatccaaggtgggttcacctttaagtcaggctggctgccagctgaagcacctcagttttcctgcacatagcctctccctccagtaggacagtctaaacatctttatatggtggctaagttaccccgcagggaaaatgaaaactatgaagtttcttgaggcctaggctgagaagtcccagaacttgtgccacagtgtattaatgaaaacaagtcatgagatcaccccagattcaaagagagaggacataagtctgccctataatgagggaatggcatacaaggatgatttgttactcagtgatggataactaatacaatatctaagaatttttgtacagggatggaaggaatcatggagctatctttgcagacaatcttacacagagattgtcatcagttcagtgaattcattgggtcaatgaaattaacatggacccagattcattcatcttcctatcatgccaccctcagtatacatccaagatggccagggtagccccagacatcctgtacttgcacaacaatacttaaaggccataaaacaggatgggcaggggaagaaggctgcatctcttcctcatgactctttttagaacaagaaaatatattccattaaagccttacatctcgttgtccataactgcatcatgtgcccaatcttaaaccaaaggaatgactgtgactggcttagattaatcaagatttgccccagcagctatacagggacagtctcccctgaagcacttgattgcctgatacttgaacaaaatcagttctatgagtgcaaggaagaaggagacagctatttggtaagcaacyagctgcgtctgccgcagatattgaagatactgaacaaaaattatttaaaagtttgaatcaaatgccaaacgatcttcctttaaataataaaaactcctgaaacattaatagcaatgtatgaagattcaatgctgattttcaaaaactcacagactttttcttaaaacacacttggaaaaaaaatgttacaatacataaaatgcatgtcttttgttattaatattgaaagttatcttggctatttctttaccctatagggagatgaagcttaaaaaaagaagaactgggctgttaaatcttagcactgaccttcaaagtcccgctaagatttcttgaggaattcctctcaggaaagctttggattaggttcagttctgttaactatcttctggtagcaagagggcataagtagttgagcagaggaaatatcagagtcaaactggtctgccatcttccaccgccatcttggggtccatattttgcagattcgcctctgaagagcacagctgtgtggaaacaggaagtcaagaaccaatgaccatttatttcaccagtgggaccacaggctttcctaaaatggcccagcactctcagagcagcctcggcattgggttcaccctctgcggaaggtaggraagaaaattcagtttgtttttggtgaactcccccaaagctgcgaatatgcgtatccaactaactgatacttctccttgaattgctataagatattggcaattataatagctacaaaacagaactcttgctggccccgcccaacctagctcagtaaatggcagcatctaaccagctgattaarcaaaagcttaagaatcaaccttaattaatcccttaacagcatgtctggctcccttttctcattgccaggaaggcctacccagaaaggccttcctaaaagagaggctatccgaccattgtcacattatcctattttattttcctcatggcatttatactacttgaaataattacatttattaatgtacttaactcactttattgtatatttattcactatctgtcaccctaaaataagagcagagatttggtctaccttgctcactgctgtagaacaacgcctagcacatttcggcttaacaagtatttgttgcatcaatggacaaactcaaaaaatcatgccacacccagcctcccactgtactctcagaccgcctgggattctgaaaatgcccttaagaagagtagaagttgaatctatcaccttgcctggggcttcttttgacccttctctgtagcccttaagataywggggcaaagtcacccctgaaagataccagttwgtaatttttgtttgtttatttttggtctgttttgttgctttttcatatcatttaggtattggctggacttgaagtcctcagatatcatatggaatatgtctgacacgggctgggtcaaggccgccattggcagtgtgttttcttcctggctgtgtggagcctgtgtttttgtgcatcgaatggcacagtttgacactgacaccttcctagacgtaagtcatgtcctccagctagatagatctttagagttcttccttgtttcccataaaatcacaaagaaattattccttagaatacaargcttcttgggcttttggaaatcatttctttatacaaagcaaagtctcaagggcctcagcttttgaaacgtatttgacagaatggagggggaacaactgcaacactctgaggcaggaaatccagacttctgcttcaaatagctcaggatttgctagtgttgctaaatctgtagctacttaagaaactggttctaaataacagattaggagtctgaagtctaaacaaatacttcatttctaattcaatgaaataaagataatagctgataaaccagaactcttgtgtggagtggacattaaaggtgggggtgcctttctcccagagcagctcctcttattctcccccagcctatacttctcactttgttaattctcagaacccgatactcttctggaaatcgggcatgcatgccctgtcttctcaaccagggacagctagattgagatatcagataactccaatttctttagactttagaaaaatgtgattcaggccaattatttttcaaccatggcaaatttattaagtttaacaaaatacatattattacatacaaaccatacctgtgtgtgaataaaagctcttcacctgttattttgctaaatggtctgacaagatggtttaaggcagcagtctgcaacctttttggtaccagggactggattygtggaagacaattttcccatggactagggggagcggggagataatttcaggatgattcaagtacattacatttattgtgtactttatttctattattattaaattataatgtataacgaaataattatacaagtcaccataatgtagaatcagtggaagccctgagattgttttcctgcaactagacagtcccatctgggggtgatgggagatagtgacagatcatcaggcattagattctcttaaggagcacacaacctagatccctcacatgcacagttcacaatagggttcaggctcctatgagaatctaatgccaccattgacctgacaggaggcggagctcaggtggtaatgcgggcaatggggagtggctataaatacagataaagcaggcataatcccagcactttgggaggctgaagcaggtggatcacgaggtcaggagttcaagaccagcctggccaagatggtgaaacctcgtctctactaaaaatacaaataattagccaggcatggtggtgggtgcctgtaatcccagctacttgggaggctgaggcagagaattgcttgaatctgggaggcagaggttgcagtgagccgagatcacactactgcactccagcctgggtgacagagcaagactccgtctcaaaaaaaaaaaaaaaagaaaaaaatacagatgaagcttcgctcaccttgccccgccactcacctcctgctgtgtggcccagttcctaataggccacaaacagaaaccagtctgtcctttgggttggggatccctggttaaaaggtcttacttaacataaatgtacactaacctaagaactgagatctctacatcaggtttacaaagtgccctaaagttggtaagttaactttgcagtttcaaaacctacatttgtaaaataagaatacttttattttacaaaaatcatgtgtgtattttaagtgctataaaaacctttatagatttatgctatttttaggtgtatacattacactttctaaaaataattagactctgcggagcagatacacatggtagaaatgcttacttaccgatcaaacatcatactttatctgtgacaatccaggcagcccagacatacattttgagagccttctcccaaatacttaagtttaatacaaattgtcaatacattaagggacatagtggaacttctccagaaggaggagctctaaaacattagtatttctctagatttaagatgcctaggccatatcttatttaagaaaccagagacataatgaactcagcaaatttttaaaaattaagaaaaggccaaaaaaaatgcttatttctacatttattcaacttactgaaaaagactaatgtattttataggaatggagctggaaaggtcccagtaggttagcttatacatccatagtcaatactatccatgaatatattggcaggaggttacaagattacactataagaggtaagttgtagccctgaggaagaataaaccagttcatactttgggttgttctcaaattaagcaattcacttgttgaattagattgtgtatgtctgttactgtaatattaatatatatacattcttttcagtaattggaaattcccaacagatatacagtcactagtgacaagtaataaatattgttttcttattcctagtagtgaccacgggatgggcacatattaatggaagaaaataacagggtgtagatatcagctctagtcatggcctttgaatgaccacttctgacatctgtgtctttctccatcatccagacacttactacttatcccatcacgaccctgtgcagtcctcccactgtgtaccggatgctcgtgcaaaaagaccttaagaggtacttgggcrgaaatctccatttgaaccacaaacaatagctaccatccaggatcacagatctctctttttcagcataggatagctcaggctttctcagtcttaccaccactgacattttgaaccgaataattctatcgtcggaggacggtcgtatgcattacagaatgttgagcagcatctcaagactctattagacgccagtagcacctcctcctccccatttgtgaaaatcaaaaatgtccctagacactgccgaatgtcttctggggggcaaaactgttccctagtctaagaaccactggaatatcctctaggacaactggacatttttccagggacaaccagacctctgtagtcccagaactcccactcaaaaaaaaattgtcctctagttctattcttttaaaaacactgtcatttagaactcaaaaaagaaagaaagaaaagcacatttatactgctttgaagaaaagctaacaaaatttatgacttgaaggtcatattcaatttagccaaaccatatgaacatccagtagagttgcaatgtatatttgtttaattcaaactcaatacatgaggagagaaaggaatagaggagcaaattaagtagcataggcttgtccatcctcttttgccaccaaagtgtggttgcccaagagggaaagtgctatgcgagacagaataaagcaaacatggatcttctcttttcctwgtcagtgtcaactcctttgctcctatgtcacggcctttgaaacatcagcatcttgttcacatttcaagagtaattcagggactattcaatgattattttgaatacacatgatttgtattctacccacaccctctggcccatttggggcctcagtgtatgagaagcaggctgttccaggctttctcacctgtgtccagtaaggctagtggttaaaagctaagctccaaagtcaaacaggcagggccctgctacttactaatcacgtggccttggacactcaagataaccttgctaagcatcaactccatctagaagagaggattaagagccccctcataaggttgtggtgagaatttaatgtaagtgacatgcttggtgagatcaccctgacaagtgggaggtgcctggtacagagtttcatgagtatcaactcagtcctttattacatggaaggctttcggcaagttctttaacctctctgaacctcaatgtcctcatgtgtaaataggggttgagaagattctaagaatgcttctaaagcccttacaacatagcgactgatcaatcaatattagctgttatatcatgtggctcatcaaaagcacttagtatcattaatagcatcttctcctgcctttttacatctttaatagctaagttctcctccacctgctaaaatgaaagctgtcaggaattttcgttataatcactaatgtgcccccatatgcctagaacaatgtctggcaatatagcaggtgttcaacaagtatttgttgaatgaactttgctaagacttgcctctcctagctgctatgcttactgcttgaatgtcctaattgtcttgcagtgaaagcactcaggttcctcttgaaaagacccatgcaactctgtctctccagatataaattcaagagtctgcggcactgcttgaccggaggggagccactcaacccagaagtgctggagyagtggagggtgcaaactgggctggagctatatgagggctatggacagacggaagtggtatatctaaagggcatttatgtttagtatatgtgggggcctttctgccccaggtttttcaactgagcccctgaagtgcccccatcccactgtaaatttttatagagtttcccgggatacctcaccttgccagtagttaccaaaacttgcagattgcycagttaggttttgatgaaggagaatgatgattattccatcattcctgcctcccccttakgcaggataaatctcagaggcgttagcgggtgggtgaggttcagaactgagcagctcatctttccactgtgctgggaataatcctctgagagygtccatgggaaattgagtccaaggtgcatttaacggagtccaaggagtggttttcaaagtgtggccctcaaaccaagcaacatcaacatcatctaggtagatttggtagaaataccaaattcttagaccccattccacacctaatgaatcagaaactctgggayaaggcccatcaatctgtgtttcaacaatgttccagaatttcaaatttgattctactgcacaccgaagtttgagaactactggtttcaaataatatatttcagaaggtgcgcctgcataccaggaaaatcagtcaaaatcaaatcttaattttcattgccatgatatagtttcagaatataaacttttgtatacttatacaaagcttgtcctctcaatagggaatgatttgtgccaatcagaaaggccaagaaattaaaccaggttcaatggggaaaggaatgctgccctatgatgtccaggtaggttgagaaaatatctgactggttcagtaaaggagagagaacgttttccttttctgctattcattgcacaactattcataagctgctttcatttttgtgaaaagaaaattttaagaccatcaattatttctttcattccagattatagatgaaaatggcaatgttctaccacctggcaaagaaggggaaattgccctcagactcaaacctacacggcccttctgtttcttctctaaataygtggtatgaggatagaaagtgctggtcatgcttaatacagacttgggttcaaatttcatttccaccrtgtcttgctatgtaatyttgggcaagcaacaaaatctttcacaactgtaaaatggggagactatcatctgtcacccaagagtactgtaaagatgaaattccaaatgtaagaaaccagttgcagtggttatcctcagaaaggaaaaccggacaggctggaatgagggtgcagttggggggtgctagaggtagaagaggggctttttattatactctttatgaccttttgtattttatattacaaactatcttttaaaaaaatttaatttccagccaggcacagtggctcacggctataatttcagcactttaggaggccgaggtgggagggtggcttgagcccaagagttcaagaccagcctgggcaacatagtgagaacccatctctacaaaaacataatacggttagtcaggtgttgtggcacatgtctgtggtcccagctactcaggaggctgaggtgagaggatcactagagcccaggaggtcgaggctgcaggctccagtctaggcaacagagagagactctgtctcaaaaaaaaaaaaatttcctatataagtaggatgtgtaatgtactagtcacttaatgagtgccatacccatctctgttctgaccagactaatccccaaatgtcatccttggttcccaggacaatccacagaaaactgctgccacgataagaggagatttttatgtcactggagacagaggagtgatggacagtgatgggtatttctggtttgtcggcagagctgatgatgtcattatatcctctgggtttgtatatttgccactctgaagaggtaacaattcgacagggagggagatctctaacttggaggatgtggtggtcaaaaacttcttttcctcttcaggtaccgtattgggccatttgaagtggagagtgcactcattgagcatccagcagttgttgaatcggctgttgtcagtagtccagatcaaatccgcggagaggtagatgaatgtcatttattaaagaagcaacatcatattttcaagttctgtccatttgaccactgtaaaggctgaaccaagagaggtcaatctattaattctcattatgaagcatgcatttggccaaaatataaatcaggcaaccaactttacaataagttgtgtcccaaaggggtggtattagaattcttttgatggcaagtggcagaaacacaattccaactgccttaagttaaaaaaaaaaaaaaagcatttggctcatataagtgacaagtacttaagtacagccacatccaaaggttcatgtgaggttggcaagatttagcccctcttcacttttggctctgctattctttgttatggctccatttgatcagattcttcctacttgatagcaaccaactccaggtgtatacaccttagcaaccctccaccccttcagggaaggatacagctctgttttcagttgtttcaagtaactctcaagacttcatttgcnnnnnnnnnnnnnnnnnnnnnnnnnnnnnnnnnnnnnnnnnnnnnnnnnnnnnnnnnnnnnnnnnnnnnnnnnnnnnnnnnnnnnnnnnnnnnnnnnnnnnnnnnnnnnnnnnnnnnnnnnnnnnnnnnnnnnnnnnnnnnnnnnnnnnnnnnnnnnnnnnnnnnnnnnnnnnnnnnnnnnnnnnnnnnnnnnnnnnnnnnnnnnnnnnnnnnnnnnnnnnnnnnnnnnnnnnnnnnnnnnnnnnnnnnnnnnnnnnnnnnnnnnnnnnnnnnnnnnnnnnnnnnnnnnnnnnnnnnnnnnnnnnnnnnnnnnnnnnnnnnnnnnnnnnnnnnnnnnnnnnnnnnnnnnnnnnnnnnnnnnnnnnnnnnnnnnnnnnnnnnnnnnnnnnnnnnnnnnnnnnnnnnnnnnnnnnnnnnnnnnnnnnnnnnnnnnnnnnnnnnnnnnnnnnnnnnnnnnnnnnnnnnnnnnnnnnnnnnnnnnnnnnnnnnnnnnnnnnnnnnnnnnnnnnnnnnnnnnnnnnnnnnnnnnnnnnnnnnnnnnnnnnnnnnnnnnnnnnnnnnnnnnnnnnnnnnnnnnnnnnnnnnnnnnnnnnnnnnnnnnnnnnnnnnnnnnnnnnnnnnnnnnnnnnnnnnnnnnnnnnnnnnnnnnnnnnnnnnnnnnnnnnnnnnnnnnnnnnnnnnnnnnnnnnnnnnnnnnnnnnnnnnnnnnnnnnnnnnnnnnctcacacaccagtgagcctctgtagtgacactgtggatcccatactcttacctcctgtactcactctactctccatctattccattctcaaaaatagtttcttcctgccaccatgttcttattctctcaatataaatgatttcagctgaacagaagtaaccaacaattagaatcaatgtatgaacaataaataatataaattatgcttactaacctcagtaattgtctaactggtgggtttgaaacagcatttcaaagagaagcaaacaatatgaggcaaaaaagacctcacatagatcaatccttcctgagaggtttttggcttttggctttgttttgtttttttgagatggagacttgctctgtcacccagggtggagtgccgtggtgcagttatagctcactgtaacctctcaaactgctgggctcagtcgatcctcctgcctcaggctctcaagttgctagtactacaggtgtgcacaactgcaccctggttaattttctttttaagtctttgtagagatggggtctcaccatgttgaccaggctggtttcaaactccggggctgaagttatccttctaccttggcctcccaaagtcttggggttataggtgtaagccaccatgctcagccctttcctgagatttgatctcccaggatacacagtccttcctccgttgagaccctccaaactgctttgaaaccacatattctctaggaactccatttgttcccctgctacatgcttctaatggtataggtttaatggagtaagtggtcatccataaaccaaggactgtctgtgtaataaataggatcagtctgattgaaatgttaaatatatatgtatctataaatagaacttagctttcttgaactgctgcactcctcacactcataaaccacttacctgaaaatattctgaaaaacctcactttgtaattgtatccaagctttgttcagaggtaacctctggcatttgcagtcatcacacaaactgttattaataaatagtaagcacctgtgttcagcatttgttgcaaatccttgatgtgtctgaaaaacaaatgagcaagataaattaacttttctgttgcaggtggtgaaagcttttgttgtcttagctgcaccctttaagtcctacaacccagagaaattaactcttgaacttcaggatcatgtgaaaaaatcaactgcaccttacaaatatccaagaaaggcaagtgctttgyccaaaagttaagtttggatgttaccaaactagggtctaagctagaattagattttactggattttgattttatagtagctcattatataggtagaagacacttttcaatttgtttaaccctaagaattttgctttaaaatgttttatattagaacggtataagtgaattataaaccagaacctttaatcaactctgcaatactgaatcactactaagagtctttctaggactaactagtcccattctgtatgagaaaaacacagtggcaaagaattgccaagtgccttgtttttagggacagtgcttgattcacctatctcagtactcttatccctaatacccctataaattcaaagtacatgccttgaagtatcaagtgacctcatttagtgttcagaagaagatgatatccaaagaaactatggaatctttcctgaaaccttcttcaaagaaggatttaagaacaatactaygtaaatacatgaagatggccctgtagtttccttctaaccatggaactgggtgataattactgatcctctgcatgagatttctgtttagcactgtttcagtcaaaaagtagttaaacctaaaaactactcacattttctccattaaattcactaaatcattgactaaagtcactaaatcagtgactgttgactttcagaaaggctatctgagggcattttaaaatacagtagtcttattttgagagaagagaacaaaaagaggatttttgtggtcaagtcagggcagaagggaaaactgtatatactccaaattatccctaaaaatcttcctcaaaacctccagcatccagctctgaaaagacaagaactgttctttttgtatttagctgtaatctccatttctcgggaacagtagaagcctaggactagtttgaactaggggaaagcaatggggtaaagggattattactttcttctggcaaagcatttcagtgaatttgcactaaaaacccgtaagatggagctacactatcacccttcctacataaacagacgtttctggtgtccatgaaattcaatgagcttaggctaagataatctcgactttaaaattcagtctgagttccatgcaagctccttcctatcgcacggacaattggaaggatggaatcaagtgtctcatcacgtttttttctgtcaattaggtggaatttgttcaagaactcccaaagacaatcactgggaaaatcaaacgcaacgttttaagagaccaagaatggagaggaagatagtttgataacaaagctgaagggttaagcagtaatatggttgctttcttttagtatttgttccgataattcagcgactactctcttaaaatgtttaagatctttcctgcttgaaaacccaactgttgattttttggtttttacttagctaaaaagtttaaaagtaaataaaagcctcaaaaatgtatggatgaaaattgttataatgaccaaactgacaaaggtaatgatgatgatttgtagtgtttaaaatagcaggaataaaatgattgcttagaacaagaaagtgcacattgaatctgtatttcatttaccttgtgcctgattgattcaaaataaacatatatcctaagagaaatgttcaagacaatttcttctgcttaacatctttatgagaccaaacttcaagacattaaagtaaggagtataaataattcaaaaattagcgagtttaatgaaattaagtactgtattattgtgcctcattttgaagcaaactaactgtaaaatatctgaatgtatacatctgtatatatgtatatatatctgtatatatacacatatgtgtatatatgtatatatactgtatatctagatacatatatacatatgtgtatatacacatatgtatatatagatatatctgtattaactctgcaatactgatgtatctgtatatatacatatgtatatatctgtatataaatatatatatctgaatgtatatatacacatatgtatctatatatacacatatatacatctatatacatatacatatatatacatctgaaagtgtatatgtatatatatacacataaagcaagagatttactaagaggccaaaagaaagaaaaagtacagaataccaatctttagggaacaaatttacttttattttttattttctttttcttttttttttttcagctattagtggtttatttgcttcagtaccatatttaatttttttttcttttttttcttttattattatactttaagttttagggtacatgtgcacattgtgcaggttagttttatttttctaaaaatatcaggaactatgaaaaagaagcttgatatttggccataccaaaagcaaaatacaagtaaaaataacatttgaaaaccatttttaaccttagagaaacatatattaaaatacaaagcttaacattctttcctctataaagctaagcaaattttctaaaccacaagactgcagttgttttttttgtttgtttgtgttttttttaactgacataattttttaaaagaaaaaactaaagggggaaaagaaagcactcaattcttaccctggaatctcatcacttatcaagtaacatgctcaaatgtcagtaaaaataaatagttgataaacctgaaaacaaattttttaatgagttcaggttataacccaacacaggattttatagctgggaaagaagagcttgtataacaaccgaggcttaccaaatacaaataaatataaaagcctaataaaaacaaactatcaaatcaaaatctttctgcagcagctttcacaaagtgaaaacaactcagttccacggagctgtatgttctgtaggcatatggctaattttattctgagtcctttggtcttatactatcaaaagaatctttgtcttggagcaagtctactgaagaaggcaccaaaatcctatcctccctattcacctaagtgattttaataatcctcttatcaatcctttcaaggtaacttcaacatcagtaagagttaacattctaaatatctaaagctatggaaggaaggtcctgcctattctctttgcccctctcaaatccttctagtctggtttaccaagcaaaaacactagctaggaggctaaaaatatattcctatgttcactagccattaaataaacatagccacctgtgtgggaagcctaacatttttactacttttcaaaacttaataataagtccatttccgtaagctaactttacagcccctcaatattcttaatctagacagtttacttcacagactttgttggtgtctgtctcttctagcctttttcaattgttttacccaggaacagtccttgaaaaagctttcaaattcagggaacccctgcagggaaccctcatggtaagtgagtgttaggattaagttgaagaatactcctatttcacagaaacctagaactgtctaactagggctgagttcactctcttccttcagagataaaatttcaggctgagcaaatttagagaaagggttcctcatccagtcatacactagcactgggaaaaggagagaaaatgctatttaatttggttttgtggttcctccaggtgggttatatagcaagatttgagagttgtacccttcatgctgaagtccaagtggctacaaaaacatttcaagagttcctctggcaaggtggcaggtcagtttccttttagaactaagactcgagtctacagctcccagcatgagtgacgcagaagacggatgatttctgcatttccaactgaggtaccaggttcatctcactagggagtgctggacagtgggtgcaggacagtgggtacagtgcaccgtgcacgagctgaagcagggcgaggcatcgcctcacccaggaagcaaaaggggtcagggaagtctctttcctagtgaaagaaaggggtgacggatggcacctagaaaattgggtcactcccaccataatactgcacttttccaatgggcttaacaaatggcacaccaggagattatatcccacacctggctcagagggtcctacgcccacagagcctcgctcattgctagcacagcagtctgagatcaaactgcaagacggcagcgaggctggaggaggggcgcctgccattgcccaggcttgagtaggtaaacaaagtggccaggaagctcaaactgggtggagcccaccacagctccaggaagcctgcctgcctactgtaggctccacctctgggggcagggcacagacaaacaaaaggcagcaataacctctgcagacttaaatccctgtctgacagctttgaagagagcagtggttctcccagcatgcagcttgagatctgagaacaggcagactgcctcctcaagtgggtccctgacccctgagtagcctaactgggaggcaccccccagtaggggcggactgacacctcacacgtccggatactcccctgagaccaaacttccagaggaacgatcaggcagcagcatttgcggttcaccaatatccgctgttctgcagccaccgctgctgatacctaggcaaacagggtctggaatggacctccagcaaattccaacagacctgcagctgagggtcctgactgttagaaggaaaactaacgaacagaaaggacatccacaccaaaaacccatctgtatgtcaccatcgtcaaagaccaaaggtagataaaaccacaaagatggggaaaaaacagagcagaaaaaccggaaaatctaaaaatcagagcgcctctcctcctccaaaggaacgcagctcctcaccagcaacagaacaaagctggacggagaatgactttgacaagttgagagaagaacgcttcagaagatcaaactactctgagctaaaggaggaagttcgaaccaatggcaaagaagttaaaaaccttgaaaaaaaattagatgaatggataactagaataaccaatgcagagaagtccttaaaggacctgatggagctgaaaaccacggcatgagaactatgtgacgaatgcacaagcctcagtagccaatacaatcaactggaagaaagggtatcagcaatggaagacgaaatgaatgaaatgaagygagaagagaagtttagagaaaaaagaataaaaagaaatgaacaaagcctccaagaaatatgggactatgtgaaaagaccaaatctacatctgattggtgtacctgaaagtgacggggagaatggaaccaagttggaaaacactctgcaggatattatccaggagaacttccccaatctagcaaggcaggccaacattcaaattcaggaaatacagagaacgccacaaagatactcctcgagaagagcaactccaagacacataattgtcagattcaccaaagttgaaatgagggaaaaaatgttaagggcagccagggagaaaggtcaggttacccacaaagggaagcccatcagactaacagctgatctctcagcagaaactctacaaaccagaagagagtgggggccaatattcaacattcttaaagaaaagaattttcaacccagaatttcatatccagccaaactaagcttcataagtgaaggagaaataaaatacttcacagacaagcaagtgctgagagattttgtcaccaccagacctgccctaaaagagctcctgaaggaagcactaaacatggaaaggaacaaccagtactagccactgcaaaaacatgccaaattgtaaagaccattgatgctaggaagaaactgcatcaactaatgagcaaaataaccagctaacatcataatgacaggatcaaattcacacataacaatactaaccttaaatgtaaatgggctaaatgctccagttaaaagacacagactggcaaattggataaagagtcatgacccatcagtgtgctgtattcaggaaacccatctcacctgaaacccatctcaccaggaaacacatctcacccgttaacagaaagttaacaaagatacccaggaattgaactcagctctgcaccaagcggacctaatagacatctacagaactctccaccccaaatcaacagaatatacgttcttttcagcaccacaccacacctgttccaaaattgaccgcatagttggaagtaaagcactcctcagcaaatgtaaaagaacaaaaattataacaaactgtctctcagaccacagtgcaatcaaactagaactcaggattaagaaactcactcaaaaccactcaaccacatggaaactgaacaacctgctcctgaatgactactgggtacataacgaaatgaaggcagaaataaagatgttctttgaaaccaatgagaacaaagacacaacataccagaatctctgggacacatttaaagcagtgtgtagagggaaatttatagcactaaatgcccacaagagaaagcaggaaagatctaaaattgacaccctaacatgacaattaaaagaactagaaaagcaagagcaaacacattcaaaagctagcagaaggcaagaaataactaagatcagagcagaactgaaggagatagagactcaaaaaacccttaaaaaatcagtgaatccaggagctggttttttgaaaagatcaacaaaattgatagaccactagcaagactaataaagaagaaaacagagaagaatcaaatagacaccataaaaaatgacaaaggggatatcaccaccaatcccacagaaatacaaactaccatcagagaatactataaacacctctacacaaataaactagaaaatctagaagaaatggataaattcctggacacatacaccctcccaagactaaaccaggaagaagttgaatctctgaatagaccaataacaggctctgaaattgaggcaataattaatagcttaccaaccaaaaaaagtccaggaccagatggattcacagccgaattctaccagaggtacaaggaggagctggtaccattccttctgaaactattccaatcaatagaaaaagagggaatcctccctaactcattttatgaggccagcatcatcctgataccaaagcctggcagagacacaaccaaaaaagagaattttagaccaatatccttgatgaacattgatgcaaaaatcctcaataaaatactggcaaactgaatccagcaacacatcaaaaagcttatccaccatgatcaagtcggcttcatccctgggatgcaaggctggttcaacatacgaaaatcaataaacataatccag

SEQ ID NO: 95295 - DNA, 14417 bp, Homo sapiens
cactgtgcctggtcttacagtcatgatgttattattgatgtcacatactggcaagcatatccaggttgggtggatgacaagtttcaggttcatatctttattttagtatgctttcttcttctttttattattattttattttcataggttattggggaacaggtggtgtttggttatatgagtaagttctttcgtggtgatttgtgagattttggtgcacccatcacccaagcagtatacactgaacgctatttatagtcttttatccctccacctcttcccaccctttccccctgagtacccaaggtccattgtgtcattcttatgcctctgcattctcatggcttagctcccacttatgagaacatatgatgtttggttttccattcctgagttacttcttagtgtgctgctttcttcttcctctttaaaacattataaaatattttgtacatcattttatatatatatatatatatatatatatatatatatatatatatatatatacagccacatagtgatttttacacaaacgaatatatgctcacctaacagatgcagtaactgagggattttctttttctttttttttttttttttgagatggagtttcgctcttgttgtccaggctggagtgcaatggctcaatctcagctcaccacaacctctgcctcccaggttcaagcgattctcctgcctcagcctcccgagtagctgggattacaggcatgtgccaccatgcctagctgatttttgtatttttagtagagacgaggtttctccatgttggtcaggctggcctcaaactcccgacctcaggtgatctgcctgcctcggcctttcttttttcttttttctttttttcctagttcttgtggtcctcaattatttttattttattttactttattttttgagacggagtcttgctctgtcgccaggctggagtgcagtggcaggatcttggctcactgcaacctctgccttgcgggttcttctgcctcagcctcctgagtagctgggattacaggcacgattctccttcctcagcctcctgcgtagctgggattataggcacatgccaccacgcccagctaatttttgtatttttagtagagacggggtttcaccatgttggccaggctggtctcgaactcctgacctcaagtgatccacctgcctcggcctcccaaagtgctgagattacaggcatgagccaccatgcccagcctattttatttttttgttttgttttctgagatggagtatcactctgtcgcccatgttggagtgcagtggcgccatcctgactcactgcaacctccgcctcctgggttcaaacaattctcctgctgagggattacaggtgcacaccaccacgcctggctaatttttttttttttgtatatttagtagagacgggatttcaccatgttggccaggctggtcttgaactcctgacctcaggtgatccacacgcctcggcctcccaaagtgctgggattacaggcgtcagccaccgcgtccggcctattttattattattatttggtagagatggggtctcactagtcttccaggctggtctcaaactcctgggctcaagctcctgcttcagcctctcaaagtggtgggattacaggaatgagccactgcacccagcctactaagggatttccaagggtaactttaactatgtgacataattgtaatttacttctcctcattttctattccttcaaaatgtaaagcttgtgacagtccagccccttcagcctggagttccacctaccagtccccacatgtgctgtctctcaccaaggttgccagtgacctctgaccaaaacaatcttgtaagtaatcaaaactgaattttctaccttgttctattctccttgacccttctgttgctccacactctctttgtccccatcgcccatatttcactcactcattctcatagttcaactcctgactaaagactgacacacctcccaaatccctgtctccagcccaggcctctcattctgcctccagacctgccattttcttgtgtgttctggatggttccatttgcttgtggctcagacacctcaaaaacatatcctaaactgaactcaccatctccctctcccaccctcctgcccctgccctcaattactcctctttctgtcatctccatcttgattggtggcaccaccttccaatcaatttttccaggctagaaacttccctttctcttttttttttttttttttttttgagatggagtcttgctctgtcgcccaggctggagtgcggtagcgccatctcggctcactgcagcctccacctccctggttcaagcaattctcctgcttcaccctccgaagtagctgggattacaggtgcccaccaccacacacagctaatttttgtatttttagtagagacagggtttcaccatgttggccaggctggtctcaaactcccaacctcaggtgatccgcctgcctcggcctcccaaagtgctgggattacaggcgtgagccactgtgcccagcctcaactccatatctaatcagtcaccaaatcttgccgtttcatcagtgtttcttgaattattttcatccttatttctactgtcctatttcaggctgttgacacttgtcacctgggctgctggaaatggtgtctttgcttccagtccttttttttttttttttttgagacagagtttcactcttgttgcccaggctggagtgcaatggcgtgatctcggctcaccgcaacctccacctcccaggttcaagcaattctcctgcctcaacctcctgagtagctgggattacaggcatgctccaccatgcccggctaattttgtatttttagtagagacagggtttctccatgttggccaggctggtctcgaactccaaacctcaggtgattcgcccatctcagccttccaaagtgctgggattacaggtgtgagccatcgcgcccagccaacttccagttctatttcccttgaagctcctctatgttgctgccagggtggtttttctaaaatgcagatctggccaggcacagtggctcacgcctgtaatcccagtactttgggatgctgaggcaggaggatcgcttgactcaggagttcgagaccagcctgggcaacagactgagactctgtctctattttaaaaattaagaaataataatttgtaaattaaaaaaataaaaataaattagctcggcatggcggtatgcacctgtagtcccagctactcaggaggctgaggtaggaggatcagcggagctcaggaggttgtggctgccatgagtcgtgatcacgctactccactccagcctgggtgacaaagtgagaccctggctcaaaatatataaataaatcaaatgcctatctgaccatgttcctctcttcttctatcctacagtggctccccatcactggcctgtcctatgggaaaacatttgcattccttaactcagcctagaaggcctctgtgacttgctgtctacttatctggcccttctcatgcttcctttctggctgtagcaaccttgaagatatcgtacttccccaaacccacctgctgcttcttgctttttttcatgcggactcttctgtctggaatatcttctacatgcagcaaccgtaacccaacctccatactgcagagaagtggctcgtctcaggccaattcctggtcatccttttagattcagcccaggctgggcgcggtggctcatgccggtaaccccagcactttgggaggccgaggcgggcagatcacgaggtcaggagttcgaggccagcctgggcaacatagtgaaaccctgtctctactaaaaatacaaaaattagccaggcatggtggtgcacgcttgtagtcccagctacttgggaggctgaggcaggagaatcacttgaccccaggaggcagaggtgagctgagatcacgccactgcactccagcctaggcatcagagctagactccgtctcaaaaaaaaaaagagaaagattcagcccagtgtgaaggtgtgaacctcttctaggacatgaaaagattcagcccaggtgtgaacctcttttggagatgctcctttcctaactgcttgaaccccggataggagtcctattctttttactcctatagtactttctttatatctccataattttatttactattactacatgatacattattttataaaagtctttgtaacctccttaaggattcactgcttaatctccagtgcttagcacaaatcattaaatgcgaaccagaaactcttccaaatgtgttacatctataacctcattggattctcactaccaaccccatgcaatagatactaatgtgatctctgtcttacagaggaagaaacaggcacagggaggttcagtaatttgcccaaggtcatacacacactggccttcaggtattcatgcccggggagtctggtcccacagctggcatgtttgccattatattatattgcctccttatagtgtcggcactcattaagcacattgacagctatgcttggtgagtgactactatgtacccagctctgtgctacatgctttacctggattatttcaactgcacaacaaccctgtgaggtaactaccatcattgctcctattttacataacagaaaactacagaaatctggggctgggcgtagtggctcatgcctgaaatcccagcactttgggagaccctgtctctaaaaaaattttttttttggccggacgtggtggctcacacctgtaatctcagcactttgggaggctaaggcaggcagatcacaaggtcaggagttctagaccagcctggccaacatggcaaaaccctgtgtctactaaaaatacaaaaaatagctaggcgtggtggcaggtgcctgtaatcccagctactcaggaggctgaggcaggagaatcccctgaacctgggagatggaggttacagagagccgagatcgtgccgctgcactccagcctgggcaacaagagcaagactctgtctcgaaaaaaataaaaataaaaataaaaatatttttttaaaaattagctgggtgtggtagcacatgcctgtagtcccagctacttgggaggctgaggtaggaggatcacttgagcccaggaggtcaaggctgcagtgggctgtgatggcgccactgcactctagccttggtgacagcaagaccctgtctcaaaaaaaaaaaaaagagaaatcgggcaacttccccaagatcgcgcagttaactagtggcatagcttcactcaaactcgaagtcttaatcaggacactctaccaaatgagatcaacggctcagtaatggattggcatccagtatgaagactggaccagcagggagaactatgatgcgtacagcctagagcctgaagcagatttcacagcctcagaggtggcacaggctgactcacaacccggggcagaaagggaccagcccagaaacagtgacccagaatcacagggaagtagaaatgggattcggcacaatgaagcccctccttgaccccatgctccttaccctcaggggcgcaggagttagtcgctcaggcggctcaaaggtcttgacggtggagaacaccatccccagggattcccgacgcggtgatgccatcaaagcgttaattctgagatgggcctgcccgggtgcggactctgccgcagcaagagaagggttaactgccccgggccttcgccgtgggggcggrgcctcggggagggtcacagcccgggactgagacccgaggttaaccgcccggggtgggctccacgggggcggggcatgctctccgcggctgctgccggtatagagcggtaactgcccaggagggggcggggccccacaggggcgtggcctcggagctgcacggccgtgggcggcgatgagagggttaagccccagagggccctggaggggcggggccgcgggacgggctcggcccaagggaggagctgggggcggaagcggccggcggtctgcgccctgcgcgcctcggcttctttccgcccggctcyttcagaggcccggcgacctccagggctgggaagtcaaccgakgttcgggggcagcggcgagggctccgggcgagtaagggggatggtccatgctgaggcccaaakggggcgaactcgcgagagtctctggcgacctggatcagatggggcgagggcagatgaagggcccaggagctttggggcagcgaggagggaggagcgggcccgttggcaaacttgggtgaaaggatggggtacctgggtgacgagcccccgccaggattctgctcttcacrccccttttctcccarctcccttccaggtcaatccaaactggagctcaactttcagaagagaaagacgccccagcaagcctctttcggggagtcctctagctcctyacctccatgggccagacagctctggcagggggcagcagcagcacccccacgccacaggccctgtaccctgacctctcctgycccgagggcttggaagagctgctgtctgcaccccctcctgacctgggggcccagcggcgccacggttggaaccccaaagactgttcagagaacatcgaggtcaaggaaggagggttgtactttgagcggcggcccgtggcccagagcactgatggggcccggggtaagaggggctattcaargggcctgcacgcctgggagatcagctggcccctagagcagaggggcacgcatgccgtggtgggcgtggccacggccctcgccccgctgcagactgaccactacgcggcgctgctgggcagcaacagcgagtcgtggggctgggacatcgggcgggggaagctgtaccatcagagcaaggggcccggagccccccagtatccagcgggaactcagggtgagcagctggaggtgccagagagactgctggtggttctggacatggaggagggaactctgggctacgctattgggggcacctacctggggccagcattccgcggactgaagggcaggaccctctatccggcagtaagcgctgtctggggccagtgccaggtccgcatccgctacctgggcgaaaggagaggtgaggcctggggcagacgtggggagaactttctgtccctggtggcagtggtttgggatggaaactcttctgacaagagcagaggggatggacyttcatccagcctgcctcaacctctgttcagtgctgggaaaggctaggggtcttcacagctgttatttaatttaacccaacagcaatagaggtgaaacaggcttgagaaagcaactttctcaagttctcttggccagtaaatggtgaaccttcagaatggagggaggaactgcagggatgagagaattcaggagatatcaacccctgagcaagaggtgcaaagcgttaggtactgggtttgatgtacaggtccaaaagaaggatgggcagagccaggtacccaggctgtataccggattccctgggctctaacctgtctctgtgccacatacctayttccttcctcagccacacctcaggatggagacactggggcyctgggcaccagggaggagagcagtggaggaggcagggccttagggtggggcagcaggggaggagcctccccaggaactgactgggtccagggcttggagctgctctctgcagttgtgtgggctgtagagtggagggccatccctcctcacctcagccccagctcccaagcctctggagtcaaagcctgggccagctccaccactgtcagagccaccttggcctgttgtttagagggccttagccagctcttcacccccagctctgactagggatgtgtgaaatcttatctgggaggcagaacttccgggtatctcaaattcccctttcagccaggtgggcacactcgaagcaggaaagcagaaaggcatctgagtaggaccccgtaktttgaggacatctggctggtggctgcacccatacttacmttcccctccttctctctcccagcrgagccacactcccttctgcacctgagccgcctgtgtgtgygccacaacctgggggatacccggctcggccaggtgtctgccctgcccttgccccctgccatgaagcgctacctgctctaccagtgagccctgtgataccacagactgtgctgaggtcttgccaccacccctccccttggggaggtggggaggcactgctggcctagaccagctgctgaaagctggtgaggctgagcccctaccccaacccaagctctgsggaaatcaacagccccagagccacttggagggaggaagaaagggagccggcgttcaaggctatgacagtctgctacgcaaaacattttttcaagtaaaaatagtaagagatgttgttawagaaacctgttcttgtttttttttttttcttgcacaaatgatcatttatatagctgcctcaaaaaggaagattatctgggcaagtccagtgaaggcagacaaaccacaagacctagtgccaggtttattccctcacatgggtggttcacatacacagcacagaggcacgggcaccatgggagagggcagcactcctgccttctgaggggatcttggcctcacggtgtaagaagggagaggatggtttctcttctgccctcactagggcctagggaacccaggagcaaatcccaccacgccttccatctctcagccaaggagaagccaccttggtgacgtttagttccaaccattatagtaagtggagaagggattggcctggtcccaaccattacagggtgaagatataaacagtaaaggaagatacagtttggatgaggccacaggaaggagcagatgacaccatcagaagcatatgcagggaaagggcagttactgggcttctgggctgcttagtycctggcttggcaggaagggtagggaagatggatggggctcattgtttggcattgatgatgtccacgarttcgggcttgagggaagcaccacccacaaggaagccatccacatcaggctggctggccagctccttgcaggttgccccagtcacagagcctgggaagggagcagaacaagggcttggtcaagaatgggatgagtctgccccatccccacctccatgtccgagggctcagtctagtcctcagcccactccacctcagccgggaacyaaagccactcacctccataaatgatacgggtgctctgagccacygcatcagagacgttggacttcagccatcctcggagcttctcgtgtacttcctgggcctagaacaagaagctggcctaagtaagaccttttctgcctctctaagaggaaaaatcactggcaccagtggacacttagtgtggtttctgactgagtcagagtaccagggctctgatccaagccaggccctggactggatgcccttggacaagtcactgtctctgggttcaaggtctctgtgtctttgaaataaggggttgccccatgtgggctgtgtctgtccaaacctattgaggcaggctgggatgagggcagggctcctgggcccggttacctgttggggtgttgcagtcttgccagtaccaatggcccacacaggctcataggccaggacgaccttgctccagtccttcacgttatctgcagggcagagatacagatggagggaagggtgaacaagaaagagctctccagccaggttctccggagtacgaagaacggtggcctactgccccctagtggacattgggggatttccaggtggcatctaccttggggctggagaagtcataggccccaagcaaagattgtcactccccctcccctttttccttttctggatcagcatggggaccaagacaggctccagggcctgaccctaccctctgagtctctgtggccctggataggctcaaaggtccctttctccagagatacctgcgatgacctttgtctgctcgaaaacaaccttctcagtgatgccagcttccctttcatctagcttctccccaatgcaggcgattactccgagtccctctgccagagcatgggccactttctgcccaatcagctgttgagaaacagacttggtgagacatccttcttggaaaaagacatcccttatcttctctcttggctactaacctcatctgactccccaaagacatgccttctctctgagtgccccaggaccacccacgtggstccgcagtctttgatcatgccagggctaaaggaagagatgaagccaaggttcagcagggagcccaccctgtggctttcccctcaacgaggaaagtgagggaagggtcccacacacccctctccacctcgatctcacctgatctccccagtaaaagccccattagtcactttgtagcagttctgcgcagccacagcaatcttgggatctagcttctgccgggcgaagtcgatataggcagtagggggagcacaaaccacctctgaggacaagatggtaccacagggggatgagactaaagaaagccttcattccccacaattcctaaccagtgccctggagccccccagccctcaccctcttcttcttggttctgctctcccccttttcaccccagcaagatgacctttgtccattttccagcccaggctgggtctgcactcaactcgaagagccttccagatacccctgagaggccacggccctcaccctgccctctgctcttttaacagctggggctccaatttcctcgagctattctcggcataggcacctcacagactcagcattctccagggagcaaccctgcttcccttctaaaatagcccatcctcacctcccctttgcaaggcaaggatttgtagcaaaaggagaggggccaactcctggggtttgtattgaggcctctggggaatgaacgagaaggggatgcctctttggatcaggcccgcggctctccgatttcggtggagggaggaaggaggatggaggagagcatcctttgcccgtgggtggcagagacctaactgactcagaggccttgcgctttgctgtttccaggttggggaaagcggtaggatggctcctcactcccaaatcgctcagcctgtttggcacgggctcggtcccttccgtggaaggcgggagtcgttcaggttgccgaagggaaggggtcagatctgggggctcagggagcccgagcagctcggcgcggggacgcggacgccggcgaggarggggaggagtctggggctacgtgcggcggcgcacggcgcgggaggccagggcgcagggagcgggaagcccacgcggcccagcctcccccggtctcccgcagagcctcgggctccgctcctaaccccgtcgcctggcgggcacagccccagtgcgcgccccggggccaccttcctccaggagacccaaaacgtccttacctgccccatagtccaaggggcatcatgtgctccgccctgccccctcgacgcaccgacggggctgcggctgcgaggcccctgcccggaccccagcggccctcgtcccacagccctgcatcaggtccgcgcggataccggcctcggggcctcggggcctcgggagagggcgctgccactcctgccccggccccggccccggcccggccagacccctcctcggcgagggcttaccggtgtcggccggcaccttggccgcgttcagagtgccgatgagctcccccagactctgcttccgcccgttcatcttccagtttcccccaacgaagaacttcctggagggcgccwtggcgctggagccgaggcgctgaaggtcagtgtctgcgcgcagycgyggccactgcccacttmtatagagcgccgcgaagtggaactccgcctcctcgccgtcctccgccatggcccgcccagtcccccggagccctgccccccgcccgccctcctgccgccgccccggccgccgcccgatgatgcactgttccgacgttcccccttcttgtggcaacgttctaggagagtcgggggctcggtcgcctccgcctcgattgcggggctttcgggacaaggcgagacctgtgagctccggcgctcaggggaaccctcgcttggcgacttgagtcccccacggggccagaagtggttttcaagcggaactagctggtggcaacttggccgtagcccagatcgcccactggggcagagagggcccctctccaactgtgggatagacaacctccttcgcccatcggagcagctcatgcccgactgctgagcaggcacccttgtacccagggagtctacctgagtgaaaacttgcgggacaaatgcagggttcacagcgggaggggcagcccacacaggcataggccgccaggatcatcccaaccctcgccccggctggcaaggcctggcaggaactgcagggactgagtcccagcctgaagccagctagccagttagggacatttgggaaatcctccactcctgtgtgaataaagagagggaagggttcttcactccatctttccttggctttgtgtcggcatttagtcactctactccacctccccacccaaccccaattttcctagagctctagaaccagtgaaaagtggagacttgactttggcagggaggcggccagagttaggagttttcttaagcgccctcctgctaaccccaggaaggtaagcctctcccccaaggtatcaaacaggacacaatttagccgttgtacttttattcacatcgtgtattttggcattttccagagaaggacaaggaagagacagggtgggggaaagactgaggcaggagggcaagtcggggggtccctatttccctcacatccctccttgaccaaccacacaggggcaaacaaagggggaggggaggcacaggtgatcgctccactgggagaggatgcacaaagctacacccacgcgcacaaacgagacccctccctccacaccagggggctgggcggggcgacacagagaagcagagcactgtgrattccgggggcaggggaagcaacaaagtctccttacagacaggtggccggcccctcccgtccccgtcctgctccatccccagagtctatcgctgcccctctgctctgcccagccattctcccacggcctccagcttcttccctgctgccggggacaaaaggaaaaagggtacagagcagaggggctgaagtccatccctcagcccctctccctcatgccaggtggtcttcccctgccctcattggtaaggggtgaggcaggctcttagctggccactctctggtagaagtagatgtagcccaggtccttgggcggcttctcggaggcacacactttctggtcattgtagatcacccatctggggaagtggggaaaacagaaaaggatgaacaaactgggcattcaaagtggcatcatgtagtctctcagacatggcccctggaagtgctctccacactctctgcccataccccaaatccacagcccagccaccatgtgccttaagggagcttcacaacctcacaagggtcacrgaccctattatgtcttcagatcctccagtacctttacaaccaccctccacccattccagggaggcagggggttggtaaactttttctggcaagggccagatagtatttgaggttctgcaggctctctctctggtctctgacacaacgactcaactttcctgccgcagcgtgaaaacaggcacaaacaacacataaacaagtgtgtccaggttccagtgaaaatttatttacaaaggcagggggcctggccaggcacggtagctcatgcctgtaatcctagcactttgggaggccgaggcagaaggatcacttgagctcaggagttcaagaccagcctgggcaacatagtgagatcccatctctatttaaaaaaaaagctggtggccagatccaacccttgggccaatcactgctgcaagaccttctgtcactctctggcactttatgtccccatcaggcagtcccttcaccttctcccatagctatcccaaggacttccaaatggccctcctcattcccaccaccattctccattcaaaacgcatgtggccagcactcacctgccttctttcttgatgtggcagacgtagtgaccacacatggtagaggtgcccatgtgactaatgaaggcaaagagctgatactctaggaaaggagagagggggtcagagaaggaaacagaagaggaatgcttgagtgatggcccaaagatccagacaacagctcagactcaggacaggagtttcagggaatgtgaggcaggtactgggccagagcctgtctccatgtcagagaaccccaccctcagatgccacgttgaggtggaaagaagcccctgactcctgaggagggcagagctgcctgaatgagg

SEQ ID NO: 95296 - DNA, 35181 bp, Homo sapiens
  misc_feature (1)...(35181): n = A,T,C or G
tacacattgagtcttcaggtttcaaaacgagaactcttcctgagtgctgtaatctggtcaaaatcacagggtgggtcgacaggcctgagttggaattccagcttgtctctttaattgtgtgatctcagggaaaccatctgatctcttgctttagtttattatttatgaaatgaagttaataataactacctcctgtggctcatgcctgtaatcccagcacttcgggaagccaagacgggtggatcgcttgagcccaggagttcaagaccaccctgggcaacatggcaaaatcctgtctctacaaaaaaattgaaaaattatccaggtgtgggccgggcacggtggctcacgcctgtgatcccagcactttgggaggccgaggcgggcggatcacgaagtcaggagatcgagaccatcctggctaacacggtgaaaccccatctctactaaaaatacaaaaaaaaattagctgggcgtggtggcgggcacctgtagtcccaactacttgggaggctgaggcaggagaatggcgtgaacctgggaggcggagcttgcagtgagccgaggtcgtgccactgcactccagccttgacaacagagtgagactccgtctcaaaaaaaaaaaaaaaaattagccaggtgtggcagtgcgcagctgtggttccaggtacttggaaggctgaggtgggagcatcgtttgacctcaggagttggaggctgcagtgaaccaatattgcaccacccactgcactccagcctgggcaacaaaggaagacctgtctcaaaagaaacaaacaggccaggcacggtggctcacgcctgtaatctcagcactttgggaggccgaggcaggtggatcactcaaggtcagaagttcaagaccagcctggccaacatagtgaaaacccatctctactaaaaatacaaaaattagctaggcatggaggtggacacctgtaatccctgctactcgggagtctgaggcaggagaatcacttgaacccgggaagcagaggttgcagtgagccgagatgacgccactacactccagcctgggtgacagagtgaaattctgtctcaaaaaaacagaaaccaaaaactacctcctagacttgtagaaaatattaagtaattttatttatttatttatttatttattttgagacagcgtctccctctgtcgcctggactggaatgcagtggcacaaccttggctcactgcaacctctgcctcccaagttcaagcgattcttgtgcctcagcctctctagtagctgggattacagatgtgtaccatcacacctggctagtttttatatttttagtagagacagggtttccccatgttggtcaggctggtcttgaactcctgacctcaagtgatcctcctgcctcagcctcccaaattgcttggattacaggtgctccaggccaagattaagtaattttttgtgaagcaccaagagccacagctggatatcatattacttaatctctcctggagttatggtgagattaaacagttataaggatgcctggcacagagtccgagctaaatgagtgatggatgtggttactggtggtaacatgctttagatatggaagatattataggacttcctgcatgccaactgcccttcaatttgtgtgggggggaagggtgggcagaaggcagaggctctcactcattctctaacattattgccccctctcccacagatgagtcctgccggcrgtgaccatcttccaacatagggatatacctccctccttcttataactgaagatcctggagcccggaagattcagggcagacagaccctgataatgagcctggcagggaagggcaaccaacatcttgtaacttgctttccccaccctgtttctgggggcagagccaattgcccaatttctaccctaatccaaagtccctggtgtgggtggggttaaacgtgctggtgcatcctaggtcatccaagagtgagcgccaagtcctgagaaggggcacagaactccctggagggtggagatggagcacctgccccccatggcagggtacactctccccacagccttcctccccaccatcccgtggggactctcgggatttaagcactcgtctctctgggaggcccagaccccactccatttataggcacatctccttcatttcctaggtcactgcccctttgtttacagctcctgcctcctcccttgaccacagcctggtttacaaattccatcagctcccagccccaccygccaaagtcccaggtttacaagccacgcttacttgctgtgtctgcgtggaattctctcctctgtcccctccagtctcctcattggagtgacctgaaggtgtggcttcctccactttttctcagtattactttgccttagttttccccaagagggaaggctggaamtcttaactctgtaccccttgatagttatttaattctgtttctcctagtggttcacaattgaactgaattgagatggtgtcgggtggctaaggagacacctcacctctccttccccattgtgccgcctttatcaattgcctgttttgttttgtttgttttttaactttccataataaaatggagttctcttcaactcgtctgcttctccttctttgggaaaaaaaaagggtatgtgaggggaggctctggtggctgggggagaggaaaatgatgggggatgaaccaggaactcggcactgacatgtcaaaaggggtctgggaagctgcacgtgggtttcacgcaggacaagcaggtgacatgagaaagggcagttgaagtgtccactagactggaagtgccatgagggctgactacatcagctggattcactgcaatatcctgtacctgtcaactagtagacacggaattatttctagaatgaatgacaacaaatgaatgaatagaagaaaagggttaaaatattacagaggacactttgagttgaagggttctagtattcagaagcctgctgccatgaaggcagctaggtagtgtatgacacaacccatgtggctaatccagggatacttacttaaagagctggggctacgaatactaaatctgaaattgctgcaaaatgaagtaagtatgtacaagagtcagtttcctggaaaaggttcccctctgatagacaatggattttatatcgttaaaggcctaaaggccgggcacggtggctcacgcctgtgatcccagcactttgggaggccgaggcaggcggatcataaggtcaggagattgagaccatcctggctaacacggtgaaaccccgtctctactaaaaatacaaaaaattagcggggcatagtggtgggcacctgtagtcccagctactcgggaggctgaggcaggagaatggcatgaacccgggaggtggagcttgcagtgagctgagattgcgccattacactccagcctgggcagcagagtgagactccatctcaaaaaaaaaaaaaaaggtttaaaaaccatcttgatagtgcatggctttggtgcccatgtagttgatatttggaattttcccatttcaaagaatatcttatacaaatgtggaacatcaatattttactcatcaggaaaatttgtttgtttgttgttagctctccaggctaacaaagatatggttgaatagttatagtccttctaccactacaagttgctcctctcagactggtcagaggaggccccacacctttactataaaacaaaatatatgagacaaattgaacttaagcatacgccaaaggttttcaatttactagcaagagaacaagccaggtgtcaaaagactcagccagttcagagaaggtctgggtagggaaggaaacagaatgattatattagtagcctgttaggtaaaggtcttaaaaagtttccagttgtgacccaggaaaacagagttaggaagctccgaggtgccaggggtgctcacagtccatctcagaaacagaaaacaatgcattcaagaggtcaggccaggtgtggtggctcatgcctgtaatcctaacactttgggatgccaaggcgggtggactgcctcatctgaggagtttgagaccagcctgggcaacatgatgaaaccccgtctctactaaaatacaaaaaattagctggacgtggtggcacgcacctgtagtcccrcctactcaggaggctgaggcaggagaattgcttgaacccaggaggtggaggctgcagtgagccaagatcacgccactgcattccagcctgggcgacagagtgagactccgagactccctttccaaaaaaaaaaaaaaaaaagtcagtgatgtagatccacttgtggctattaataagaacaatgtttcatttcctaacagtagtgcctggtaactgcaattaatcacaaaagtatgatgcaggatcaaacaaatcagacagcagagcatcgagtaacaaattcagctttttgttttgtttgtttttttttttttgagcatagtcttggtctgttgcctaggttggagtgcctgacctcggctcactgcaacctctggctcctgggctcaagagattctcctgtctcaggcccagtgcggtggctcacgcctgtaatcccagcactttgggaggccgagacgggcggatcatgaggtcaggagtttgagaccagcctgaccaacatggtaaaaccccatctgtattaaaaatacaaaaactagctgggcgtgatggcatgtgcttgtcacacttgtaattccagctactcaggaggctgaggcaggagaatcacttgaacctgggaggcggaagttgcagtgagccgagatcgtgccattgcactccagtctgggcaacagagcgagactctgtctccaaaaaaaaaaaaaaaattctcctgtctcagtctccagagtagctgggactacaggtgcacacctccacacctggctaattttttgtagagatggtggggtctcaccctgttgcccaggctggtctcaaacccctggtctcaagatatcctcctgcctcagcctcccaaagtgctgggattacagcaagagccactgcacctggccttgcttacttttaaataagcagccaccagtgattttctcaagctgttaagcaaaaatgcagaacacagtttgcctgttccttagtttggagattttgtctttaacaactttccccagttccccagtttcttcctgcctagaggtcttcccttatacctgacctgtcttcactcctgctgcaggcaaaccagtcctagcaacggtcacttttttgtttgtttgagacagagacttcctctgttgctcaggctggagtgccgtggtgggatctcggctcactgcaaactctgcttcccatgttcaaatgattctcctgcctcagcctcccgagtggctgggactacaggcgcacaccaccacgccaggctaatttttatatttttagtagagacagggtttcgccatcttggccaggctggtctcgaactcctgacctcagataatccgcccgccttggcctcccaaagtgctgggattacaggcatgagccaccgcgcccggccaacaatgctaatatgttttatgagcatggacccgatcttccaatctgaaatagaatttcattcctcccttactttgtatagtttttggctctataaaatttccatactttctttattatgtatcctgtccctcccccaccgcaaaatgtaaatttggtaaggaacttttgatttgtcctctgctatatcccagggacggaaagcaatgagcacacattaggcatccattaaattaatttcacttgttgaatgaatgcgtgagcgaagcactcacagactgaccatcagggggcgtcagagaaactggacagaggcgaaatgaagaaaaaagaattaccccgagttttcaggtatggttccgcgaggtttgaactcgctcggccaccgtagtgcttagaggccgaaaaagtacagccccttccgggctccgcggtacgggaagacagctttgggatgtcggaagatcctagaggtcccaaggtagctgacytgcgaagctgaggctccagccgagggctccaggcctstgaccggcccagcagtgagcgcggctgcccgacgcttcagggccgggagcagggagcgtgagtcgccatggcgacgccggcgggtctggagcgctgggttcaggacgagctgcactcggtgttggggctgagcgagcggcacgtcgcccagtttctgatcggtaccgcacagcgctgcacctctgccgaggagttcgtgcagcgcctrcgagacactgataccttggatctcagtgggccggcccgggacttcgccctgagactctggaacaaggtgtcggcaggggtggggaggggccctgtgatttgtcccggtgaggctggcctmacggtccatcgagaagttaagaaagctcagttcrcaagcacttattctttgtccgttgtcgcgtaggtactgtgctagctgctggacgcccagctcagtggagaagattgaggagggcttaggtgtgtcgggttaagcgcaatagaacggtgtttctcgaactcttaacatgcatccaaggttcttgttaaaatgcagattgcgattcagtagggatcttagtttctgcatttctttctttcttttttttttttttgagagacacagtctcgctcgccccgtcgcccaggctggagtgcggtcgtaagatcacggctcactacagcgtcgacctccctggttgaagcgaccctcccacctcatcttccccggtagctgggactacgggcgcgcgccaccacccccggctaatatcttttatttttatttttatttttagagatgaggccttggtgtgttgcgcaggctggtctctaactcctcagctcaagcaatcctctctcagccccctcagagtgctgagattacaggcgtgagccaccatgcccggcccccctcatcttctgaacttcctttcagtcgtttaattaacagagggggccgggtgcagtggctcacacctgtaatcccagcaccccgggaggctgaggcaggaggattacttgagcccaggagttcgagaccagcctgggcaacatggcgaaaccttcgtcctacaaaaaaattaaaaattagttgagcgtggtagtgtgcacctgtgtttctagctacttaggagcctgaggtgggaggatcccttgagcccaagagggacagagtgaaaccctgtctgtaaaaaaaaataaaaaaccccattcaggatgatgaagatggggtgaagccatgaggaagaaagagaatgaatgctggttagctggtttaaaactaagtaattgtgcccgggtgcggtggctcatgcctgtaatcccagcactttgggaggctgaggtgagtggatcatgaggtcaggagtttgagaccagcctggccaacatggtgaaacctcatctctactaaaaatacaaaaatagtcgggcgtggtggcatgtgcctgtaatctcagctacttgggaggctgaggcaggagaattgcttgaacctgggaggcggaggttgaagtgagccgagatcacgccattgcctgacagtggggccgggccgcgggggcaggaaagactaagtaattgcttaaattaggaacagagctaagtgggagggcagagatcaggagttgctcagacctccttatcttcccctctactgacaggtaccacgaaaggcagtggtagaaaagccagctcgggcagcagagcgagaggcccgggccctgctggagaagaaccgatcttataggttactggaagacagtgaagagagcagtgaggagactgtgagtagggctggaagcagcctccagaagaaacgtaaaaagcggaaacacctcaggaagaagcgtgaggaagaagaggaggaagaggcttctgagaaagggaagaagaaaacagggtaagtcagaagcagggtgagagaggatggggcaggctgaagtgttctctatgcccttatttaatcccctggatgggctgcagggggagtaaacagcagacagagaagccagagtcggaagatgagtgggaacggacagagcgtgaacgccttcaggacctggaggagcgtgatgcctttgctgagcgggttcgacagcgggacaaggatcggactcgaaatgtcctggaacggtcagacaagaaggtgaataggagcagcatgttctgtaaatccccaagatcccagggtgaaatctgaggttggctgtgagtgcagagatagtgatctctgggaagacaaggggctgtctctagtgagatgttcacctctgtggtgagagaagccctgtgcatcctgtggctaagacaactgtctgctgtacctgcaatcagagagattcctcactgagaggggacattttttgtgttagggcgcatctgaatgatccttgtgattctagaggggagcagctgtcagtgtgggggctctttggcctcacacccctccattcttgttttttcttctaggcttatgaagaggctcagaagcgcctcaagatggccgaggaagaccggaaggccatggtgagtcccagggcctagggagccaagatcagaagacaaaaggaaagactttctgatagagtgtatagggagagaggatacagaggaagcacagtgtggatgctgatggggkggtcaggtttctagaagaggggcttggttgttaggagccagctgaggatagacttatgttgttgagggaaggatccytcttaagttgtagggggaaggaggctacccataagtcctccttgactcttaactttaggatcaaatatactctattagtgaatgaaattgtgagctttccctattcctgagtcctaatgagatatgaggcagctggaatgttgtcaagaaggttgctggagggcaagggcagggcagcagtcccactgtacagggatgtgctgaccattcagcttaggcacaccatctccaaataccttcccaccacctaattcctgcaccccttatgtggctttgtgatctccctgtgtcttctcactggacagggacagagcccttgtaattcataaactggactttttatggtgtgaaactaggtagggtaagctgttttccaaaggcctggtcttgtcaagtaaagtcacacttagattccccaataccccaatagaattttgagactcttgaagttccttttttttttttttttttttaaaccttttttcttttttttgaaacggggtcttgccctgtcaccgaggctggagtgcaatgatgcgatctcggctcactgcaacctccgcctcctgagtagctgggattacaggcgcacaccaccacgcctggctaattttttgtacctttagtagagacggggtttcaccatgttggccagggtggtctcgaacccctgaccttgtgatccacctgctttggcctcccagagagctggaattacaggcgtgagccaccatgcccagccttctttttatttgttttgttttattttttatttttatttatttatttttgagatggagtctcactctgttgccaggctggagtgtggtggtgcgatctcagctcactacaacctgtgcctccctggtggaggaatcaagcgattctcctgcctcagcctcctgagtagctgggactacaggcctgcagtaccacactcggctaattttttgtatttttagtagaggagatttcatcatgttggccaggatggtcttgatctcttgaccttgtgatctgcccgccttggcctcccaaagtgttgggattataggcatgagccactacgcctggccgtttttactttttaaaattcatttatttatttttttgaaacagagttttgcacttgttgctcaggctgaagtgcagtggcgtgatcttggctcactgcaacttccacctcccgagttcaagcgattctcctgtctcagcctccagagtagctgggattacaggcatgagccacctcgcctggctaattttgtatttttagtagagatggggtttctccatgttggtcaggctggtcttgaactcctgacctcaggtgatccacctgcctcggcctcccaaagtgctgggattataggcgtgagtcaccacgtgcccggccaacttttggagttctaagaatggcctactggttcccaggtctctcctgaccaatttatctcatatctcttcctgaaattgactgtggttaggcttctgggacatctcagtgcagttgtggtggtagtggtgttactgttttggcctgaatttaatttttcgggttttttttgagacagaatctcattctgtcgcccaggctggagtgcagtggcatgatctcggctcactgcaacctccgcctcccgggttcaagtgattctcctgcctcaacctcccgagcagctgggactacagacatgcactagcatgcctggctgatttttgtatgtttagtagagatagggtttcaccatgttggccagtctgatctcaaactcctgacctttggcgatccacccccctcggtctcccaaaatgttaagattacaggcgtgagccactgtgcccagctgtaatttttctttttcgattacaaaaatatttaagcacatagggaagttgaaagaatagaacaaagaacactcatagacactattcagattgaaaaatggttaatactatgggtagtatttgcattgtaattgtaaatgtggtatgttttttcttttcagaccatttaaaagagtcttagacatcatggcgttttatctctaagtacatcagtgtgtacctgctaaggataaagatattgtcctctaaaatcagaatgctcttgtcacagtcaggaagttgaacagtaattcttatgtatcgactaagatctctctacaataaaagataccctcattaccctcaaaataactttaatgactgctttttcctaacaagaatgcagtcaaggttcatgcattgcatttgggtcttagatgttaagtttgtttctctctctgtctgtctcaccttgcagtgtcctacattctggatttgcctgattcttatcttgtggtgttaagtacttctctgccctgtgctttctttgaagcaggaattgggtctaaagcttattgacactcagattaaacagttgtggcaggaacacttcttgggcggtgatgtgcacttcatattatgtcatatcacggggacatactatccagttgtgtatctatatattagtattaatatcctttctaccaatagcctttcatcaaatgcttttagaagccactggtaatcctttcctgaacatgttatttttattggggattgcaaaatggtgattttttttttttttttttgagacagagtctcgctctgtcgcccaggctggagtgcaacggtgcgatctcggctcactgcaagctctgccttccgggttcatgccattctcctgcctcagcctcctgagcagctagaactacaggcgcctgctgccacgcccggctaattttttgtatttttagtagagatggggtctcaccatgttagccaggatggtctcgatctcctgacttcgtgatcctcttgcctcagcctcccaaagtgctgggattacaggcgtgagccaccgcgcccggccgaaatggtgattttttgattctgtcattcctgttacgtgtattggctagaatttgtctataaagaagagcttttcctcaacaactaggaacaagctacagttccttcttaaaaagggtaaatgtttgtttccttttaaatacgaatttttagagtaaggcgtttgctgtaacagtcatttcactggtgacagatttttttcccttgttttttgtttgtgtgtgtcaaattggactcatgaatttttatttttcagtattttataatctcacatcattattctttttaatgctcaaatggctctgattttttgcccatattaaaaaaaaaatctatctggctcttccatggaaggaatatttgactgtggtacccagattaggtcatgatcataaactgcattttaagtctttacagaacaaacaagaaaagccaaacaactaaatagaaccaggccccttaagggtagaacagcagaggggctttttttttaaagatgcagttttgttcttgttgctcaggctggagtgcaatggcgtgagctaagctcactgcaacctccgtctcccgggttcaaatgattctcctgcctcagcctcccgagtagctgggattacaggtgcccactaccatgcccagctaatttttgtattttcagtagagacgggatttcaccatgttggccaggctggtctctaactcctgaccttaggtgatccacccacctcagcctttcaaagtgctgggattacaggtgtgagtcaccacgcccacccagccaccagaggggctttgaccttgcagtagaggaagttgtgatcacagagaggatgatgtcatagtgggaggactcctggcaggaaagggccttatagatattgccagttttctgctgtcatccataatgtgtcctgaaaagtttgtatcaaaggtaaatgtgtagaaactaagtgagacacagcatggtgaagagaggttagtaccagaaagccaaacatccctgattacatttgccttacagaaacactctgatgctgtagtcctaactttttataatcagtttttctcccttcctcaaactacagtcattccgtttaagaccaaagaacatctaactggggctgaagattgcctcctgttggccccctcactggtttctatctttgtctgaattgttttcggtttgagtcctgtgcttctaaaygctggattagccttttattttccccctttccactaatttgaataaaatggcaagagtaaaatataagctacgcagacatctccctagtgcatctatattaacaaagatgataatgctgcctaagaggactttccagctggattctgctgcaggaagatacgatgtggggtcagcatgtagcatccaaagaggcccagatttgagtatgtcattgttttggttgtgcattgcagagggaaggtagagggtgcatcctgaggttctcatgcctgcctgtcaggggatttttcccttgtagggattggtagagaaaggggttgctcctccagcaagatgaggattcgactgtcctttcccaactcaggtccctgagctgcggaagaaatctcgccgagagtacctggctaagcgggagcgagagaagcttgaggacctggaggcggagctggctgatgaggagttcctttttggggacgtggagctgagccggcacgagcggcaggagctcaaatataagcggcgagtgcgggatctcgcccgggagtaccgggcagctggggagcaggagaagctggaggccaccaatcgctaccacatgcccaaggaaacccgargacaggtgaggtgaagyggcgtctgcttcagccttggtccccaagacaagttgtggggaaggcttcaggggattgggcaacacgtgggtcatcccctttcttgccttgccgttcccaatgggcagtgggcgggggtagtaatgggaagaggggagagggcagagaggacatcctgtttttgagtcttcacatatcccctctctctgtagccagcccgagctgtggatctagtggaggaggaatcaggagcccctggggaggagcagcggcgctgggaggaggcgcggcttggggcagcgtccctgaagtttggggcccgagatgctgcctctcaggagcccragtatcaactggtgctggaggaggaggagaccattgagtttgtccgggccactcagctccagggtgatgaggtaagaggggagctgggagactttctgaggaagacccgtagcgagctatttagctcacacctccttctctttccttaggagccrtcagctccacccacttcaactcaggcccagcagaaagagtccatccaggccgtccgccgcagcctcccggtgttcccatttcgagaggagctcctggctgctattgcaratcaccaagtcctcatcattgaaggcgagacaggctcagggaagaccacccagatcccgcagtatctctttgaggaggtacagtcatctcacccttcagcttgccagggcacctggcatcaatgtcctcattcctgtcagagctccttttacattatatttttagtagtcacttacctatcttttccactaaattgtgaaattcttgagagtaaagaccatacccttttcacatttctgttctcacttcctgcattcatttcatttggaaggacgggtagatggataggtggagtggggcgtgtataaatgtggacctccctatgctccaacgtggccaaaaaacaaggagttaaaggactattttcctgcctttttgttagttttttttttttttttttggagacggagtcttgctctgtcacccaggctgkagtgcagtggtgcgatcttggcttactgcaacctctgactcctgggttcaaggaattctcctgcgtcagccttcagagtagctggaattacaggcatgcgccaccacacctggctaattttttagtagagatggggtttcaccatgttggccaggctgctctcgaactcctgacctcaagtgatccagccacctcagcctcccaaagtgctgggattacaggtgtgagccactgtgcctagcccctgccttattttggagacaggctcttgctctgatgcccaagctggagtgatgtggcaccatcatgactcactgcaacctgggactcctgggctcaagagatcatcccacctcagcctcctgagtatctgggaggtgcacaccaccatgcccatattaaacattttttgtttttttttgaggtggagtcttgctctgtcaccaggctggagtgcagtggcgcgatcttgactcactgcaacctccacctcctgggttcaagtgattctcctgcctcagcctcctaagtagctgggactacaggtgcgtaccaccacacccagctaatttttgtatttttagtagagatggggtttcaccatgttggccaggatggtctcaatctcctgacctcgtgatctgcccacctcagcctcccaaagtgctggagttacaggtgttagccactgtgcctggcctgaaatttttttttttttttttttgagacagagtcttgctctgttgcccaggctggagtgcggtggcatgatcttggcttactgcaacctctgtctcccaggttcaagcgactctcctgcctcagcctcccaagtagctggaaatacaggcatgcaccaccatgctcggctaattttttgtatttttagtagacggggtttcaccattttggccaggctggtctcgaactcccaacctcaggagatccgtctgcctcggcctcccaaagtgctggaattgcaggtgtgagccactgtgcctggtcaaaattttgaatttttaatttttttgtcacactatgttgcccaggctggtctcgaactcctgagctcaagccatcctcccacctcagcctcccaaagtactaggattacaggcatgagccactgtgcccagccttcctgcttttttaccttagctggctctgtctcagctaatctgttcttttccagctcaagtctagcagagtcatgaacttaattacccagagctgggtgaggaccccctttgagggccctaggtctgtcatcctatctatttgcccttcttttctggttttcagcatctgtcttttcctccttttctcctgcctggtttttacaacttctttctctgaaatgtacctggtcccagggtgcatatttagtaaagggcaaacttcttcttttttctttgtcattcagggttatacaaacaagggtatgaagattgcctgcacccaaccccggagagtggctgccatgagtgtggccgcccgagtggcccgggagatgggtgtgaagcttgggaatgaggtgagatttctagggaaccggggggtagagtctggggtctgtgactcagtctacagttccctcaggtccctacagcagaagtcttggtgctgccccacttcacctttccccaagttcctttcagggcacaccagsccacacttggttgctaatggttcccttgaccaggttggctacagcatccgctttgaggactgcacatcagagcgaactgtcctccgctacatgacagatgggatgcttctccgggagttcctctctgagcctgacctggcgagttacaggtatctctaatctctggcctttctctcccttcttcccacccagccaattcagccattgtcttctgattaatccacccgttcttgaatctttgtggttcaaatggtccttgaactgacctccaggtaccacggagatggggctggaggacagaagagattgtagagaaagcctcttctttccccattcatctccagggtttagaaaacaaccaggatagcagagcattgctgccgagacttgaaataccgtgtgaagaccatttgaaaacacttggaatgctcagctcagagggagaaacaggaagcatcctggttccctctaaatatgtgaaggctgttacatggaaagaaggatcagattgttttatgtgaccctacacgacatagctaggagccatggggaggttacagggagacagattccaactcaataccaatggctgagtaaccctcagagtggtggagattgcarggcctgtcagagtggttggactctgggtcttggccctccacacaagtcttgggtagcttggtctgtgaataatgagctcttagtgctggaaatggccaagcaggggttggttgaacatgtgttgagggggaaaagggattcatgaatgtaatgggggtggggtcaggccagctgaacaatatgtgcctttttgactcttcagaggctgtgaatttctggtcttggaagatcacagtggagcaattggacagataggattttatccttcatatcccttgcaaaaratctctaagaacccatggagagccagccagcgcaagagtgtctgatgcagatgtttttgcccatcgagccagcctgctttgtggaatggctggggacttcaccatcacagttagggttaggcacaaagagttgaggtcagggaggtgggtaggggaagatggggatgagttcctgggacttggctgccacccagaaaagccaaagaacaaagagaaagaaggtgtcatgcacataactgagttaggaggaaaccaaggagcatgcagagtcctgtgagagttgaggtagaaaggcttaacttgctcctgtctccaaaagaagaaacagtcaagaatgatgccagcagcagttgtcccacaggacaccaggagcttctaggctatttgaatcacagcagctcaggtctattacccccagtcagccttgctggcccacccttattgaaagggaccctgccttccactttttttttcctttaaaacgtatcagccgggagcggtggctcacgcctgtaatcccagcactttgggaggcagaggcaggcggatcacgaggtaaggagatcaagaccatcctggctaacacggtgaaaccccgtctctactaaaaaatataaaaaattagctgggcgtggkggcgggcacctgtagtcccagctactcaggaggctgaggcaggagaatggcgtgaacgcaacccaggaggcggagcttgcggtgagccgagatcgtgccactgtactccagcctgggcgacagagtgagactctgtttcaaaactccgtctctactaaaaatacaaaaaattagccaggcacagtggcaggcacctgtagtcccagctacttgggaggctgaggcaggagaatggtgtgaacccaggaggcggagcttgcagtgagctgagatcatgccactacactccagcctgcaacagagcaagactgtctcaaaaaaaaaatccttccactttttcttttttctttttttagatggagtctcgctctgtcacccaggctggagtgcagtggcacgatcttggctcactgcaacctctgcctcccaggttcaagcgattctcctgcctcagcctcccaagtagctgggactacaggcgtctaccaccacatctggctaattttttttgtatttttagaagagacggggtttcactgtattggccagactggtctcgaactcctgaccttgtgatccacctgcctcggcctcccaaggtgctgggattacaggcgtgagctaccaccatgcccagcctaaaacatatccttcaactttttctagtaagagcagctgctgagtctaagcagactcttgactgaactagagggtatggctaacttgtcctggcctcagtgtgcagcctctacatcttgtytcctattrtctgctgaggctgggataggttgcagatcatggggccctggccttctctgactttctgttgctctacataagtgggatggctgacttctccttagagycccctccgtcaacagtcattcttgaactctttgtgtccattactcccctctcatccagttaacyctggtgtctgatactgcattgcctagcgctcttccctcattgctctcctattccctccccagcgtggtgatggtggatgaggcacacgaaaggaccctacacacagacattctctttggattgatcaaggatgttgctcgcttccgacctgagctcaaggtcctggtggcttcagccacaatggacactgcccgtttttccaccttctttgatgncgcccctgtgtttcgaatccccggacgcaggtttcctgtggacatcttctacaccaaggtgccccctcagggaggatgggcttaagtctgtggcagaaaagctgaggcctttggagaaggttatcctgtggagggaaagatggaatggaaggttcaaaggggaactaggataaagtgtatgttgaattgggaggagaggaaaggtttgcctaagcaggtggccctcctgtgaccccatctctttctgctctccaggctccagaggctgactacttggaagcttgtgtagtatctgtgttgcagatccatgtgacccagccccctggggatatcctggtgttcctgacaggacaggtgcctgacatggtggggagaggggatgatgtatcccaggggaagacagggccggcatgttggccttctgtgactctgggacccctgctgctctccctaccctctatccaggaggagattgaggctgcctgtgagatgctccaggatcgctgccgccgcctgggctccaaaatccgggagctcctggtgctgcccatttatgccaatctgccctctgacatgcaggcccgtatcttccagcccacaccacctggggcacgaaagktcagttggagaaacccacactcttcacccctrtgcttcccacaactagtagtgaaaaagctgtgtgcctgccccatgcaaggtgagtcctgcgcactgctgcacacagctgaggagcagccagtcccttgttcctgggactgaagagaggagaaatatggtgtgaaccaagagagagccaaatatgtgatctggaaagtatgcacagtagattcagtggagaagggaagtccttgatgtgctaagaggtgggatttgatatggacctttaagagaaatgtctgaggtcaggtgcggtggctcacgcctgtaatcccaggactttcggaggctgaggtgggcggatcacttgaggtcagtagttcgaaaccaggctgcctaacgtggtgaaaccctgcctccactgaaaatacaaaaatcagcagggcatggtggcgtgcgcctataatcccacctgtttaggaggctgagtcatgagaatcgcttgaacccaggaggaggaggttgcagtgagctgagattgtgccactgcactccagcctgggtgacagtgcgagactccatctcaaaaaagaaaaatggctgagaagtcatcagaggaaggcccaaggtatgtttgaggtcagagtgtgagmtagtaggcttagtgggaggttcatgtggtgaaggagtaggagacaaggctaaaaacaatttggggctaagattagggagggcctttgatgacaggaaagtttggactttatttatttttcttttttgagacagagtctcgctctgttgcccaggctggagtgcagtggcaagatctcggctcactgcagcctccacctcccaggctcaagtgattcttgtgcctcagcttcccaagtagctgggattacaggtgtgtaccaccaccccaagctaatttttttttttttttttttgagatggagtctcactctgtcgcccaggctggagtgcagtggcaccaactctgctcactgcaacctctgcctcacaggttcaagcgattctcctgtctcagccccccagtagctgggattacaggtgccctccaccacgcctggccaattttttgtatttttagtagagatgaggtttcgctattttggccaggttggtctcaaactcctgacctcaggtgatctgcccaccttggcctcccaaagtgctgggattataggcgtgagccaccatgcctggccaacacccagctaatttttagtagagatggggtttcgccatgttggccaggctggtcttgaactcctggactcaagtgatccgcctgccttggcctctcaaagtgctgggttacaggcatgagccactgtgcttggcgaagtttggactttagacagctgagtagcagtcaaaggattttgagcagagatataactttcattcaacaaatatttaatgagttccttctgtgtgtcaggtacacaggggttgatgatacagtgatgaacaaaacaaagtccttagcctaacaaacttgcacttgtggtctatcggggaagcagtggatgcataaatacatattgtcaatttgtggccagtgctatgaagagatacaaggcagcatagtaggatggaacttgactctgtggggtgggagtgaggactggcatgaaggtattttccttggggtgtagggagggcctcttcagtaaggggaaagtggaatagagacccaaaccaggtgagggagggagccaggctgatatctgggagaagagtatgccagacagagggaatagctgatgcaaatgatccagtgaggagtgcacttacttgggcagagcaaagcagtgtgtgggaggagtgagggaggtggtggagtgctagcagatgaggtcagaaaggcagctggggtaggtgatccaggcttttaaggggcttggattgaattctagagtaggataggaagccactgaaggatggggagtgatgtgacaggtttgtattttaaaaggaccatcctggatgccatgtgacagaggctaggagcagaagcagggatacacgttaggaggctcttacaggaagtgttgtgtgaagacgaaagcggtgatggggaggatcgggcaggaacttgaacacccccatttcccatctctgaaaaaaaaaaaaaaccctaaatcctcttctccatttcctttcctcctatggccctgctgactcccagcccccacttccctgtcccctgtcttctggccttgtcccctgctcctgaccttggatactactaattccctcagctcctgccccttactgcaactgcttcactactcctaactttccaagattactttttctgggtaactaggtaggtggggtcactgggtgaccccatatcctatcactcaggtggttgtggcaacgaacattgctgagacatcactcaccattgagggcatcatttatgtgctggatccagggttctgtaagcagaagagctacaacccccgcacaggcatggaatcgctcactgtcacaccctgcagcaaggtcagcctggggatgcatgggagtgggggaggtggagttggcccacagagaaggtccaactcagaagcagggtgggggcttcctagggaaccgggatgagcagtttgcatccttccagatttcttgcataaatactgcctttttcttttccctgaccaaattgtcagccagcctgttcccctttctttmcaggcctcagccaatcagcgagctggcagggcaggtcgggtggctgcagggaagtgcttccgcctgtataccgcctgggcctatcagcacgagcttgaggaaaccacagtgcctgagatccagaggaccagcttgggcaatgtcgtgttgctgctcaagagcttaggtgattgggctacctgagagaggagggaggggctggagtcactgtcctttgaagggactctgttccatccatcacacctctttctagggatccatgacctaatgcactttgatttcctggaccctccaccatatgagacactgctgctgrctttggagcagctgtatgctctgggagccctcaaccaccttggggagctcaccacggtgagtcgggggrcagcatgggtggaggcaggatgataggggtcaggatggctccagggacccctgtagtagtagcgggaaacctgagggaggactgggctcaactctctctctcttctccttagtctggtcgaaagatggcagagctgccggtggaccccatgctgtccaaaatgatcttagcctctgagaagtaagccctcgcctccacctgggcccccagcacacaaacaggccaggcctcctctgtctccagggtcccctttgtctgtctttttctgttcatcatactatcccttaacacataataaagtattagataactctgattgcccccttttgaggcccacaagggtaagacacttgatcctatccttgattccactgcgcccggccccttgaggaacttacttgttcctaaggtttccaactagaacatttagatgtagctgtggagggatgacctttaaatgccattcctctgctgtcagagatcttttccaaatgcacatagtgaatgcacactttctgcagaagcctcagaattccccggtgtttcctgctcctgcctccatggatgtccctcctttgtgactgtgtttcatctatggcccctacttccttgacccccaagctgctgccagaatctatctgctggctgctttgtagccattatgccaaccagccttccccacatgaggaaacatccatcacacagtgatcactccccactccaccatatctgttcctatgtgtcttgctttgaactcatgctttccccttcctgtcccaggtacagctgttcagaggagatcctgacagtggctgccatgctctctgtcaacaactccatcttctaccgaccaaaggacaaggtcgtccatgctgacaatgcccgtgtcaacttctttctccctggcggtgaccacctggttctgctaaatgtttacacacaggtcactgggcttgggtgagtgggaatgagagacactgggggactttagtcctgctgtatacttaattatctctcctttctttttaactgtcttcccagtgggctgagagtggttactcttcccagtggtgctatgagaacttygtacagttcagatcgatgcgccgagcccgggatgtgcgggaacagctggaagggctcttggaacgtgtggaagttggtctcagttcctgccagggggactatatccgtgtacgcaaggtcagcatttcttcagcctcctgctttccacccccagtaccttcccaggagcaagcttctctgggggcatgcagcatttcctccagcgtgagagcatgccctcttccccttgtgtatgacgtgtcctcccagggccctttcttccccagaccactgaaggttcattcctgggaagttcttcatgcattccttacctctctagttttcctgaagcctgaactaaaaaggtagtgcattcttagggtccccagatgtctgccttttccattgattttctttcctgcccgctccttaggccatcactgctggttacttttaccacacggcacggttgactcggagtggctaccgcacagtgaaacagcagcagacagtcttcattcatcccaactcctccctctttgagcaacagccacgctggctgctctaccacgaacttgtcttgaccaccaaagagttcatgagacaggtgaggagaacatcctgtgcccaygcaggtggagactatgtagagagatggtgtcctggcaagctaagaacccaggttcaagttgctgggactggtacagaaagaggaaggtagggtaaaatagaaagacatcctttgtttttttttgttttttttgagacggagtctcactctgttgtccaggctggagtgcagtggcgcaatctagcctcactgcaacctctgcctctggggttcaagagattctcatgcctcagcctcccaagtagctgagattacaggcgcaagcctccaggcctggctaatttttgttatttttagtagagatgaggtttcaccatgttggccaggctggtctcaaatgcctgcctcggcctcccaaagtgcagggattacaggtgtgagccaccatgcccagcccaaagacatcctttctaacaggtgtgtcagcatcttccaagatctgagaactagacacttattcaataaatatttgaatggctactgtataggtgctggggctataatgaacaaagcagtctctggtctcacagagtatagtctttatgttctaggcttttcttttttttgagagagttccgtgctgttgtagcccaggctggagtgcagtggcaccatctcagctcatgcaacctccgccttcggtttcaagtgattcccctgcctcagcctccagtgtagctgggattacaggtgcccaccaccacgcccagctaattttatatttttagtagagactgggtttcaccatgttggccaggctgatctcgaactcctgacctcatgatccgcctgccacggcctcccaaagtgttgggattacaggtgtgagccactgtgcctggcatgttgttctagacttttcttgggaatagcttatttggtatcttgaataacatacagaggtgtatctgccctttgggtatataataatagagccaggcacctttacacctagccctgcagtcaaagaggaaagataacttttgaccatacacataaggatctaggttggggctgggcatagtggctcatttttgtaaaccatcccagcactttgggaggccaaggcaggatcckagcacttygggaggccaagatcagcccaggcaacatagtgagaccccaactatacaaaaaattaatggtgcactgtgatgtgtgcctgtagtctcagctacttgggaggctgaggcagtaggactgctttgagccatgatacgccactgcagtccagcctgggcaatagagcaagactctgtttcaatttaagaaaaaaaaataacaacaacaaaagatctatgttggaaagaagggaactccattgatcttttctctctcctaggtactggagattgagagcagttggcttctggaggtggctccccattattataaggccaaggagctagaagatccccatgctaagaaaatgcccaaaaaaataggcaaaacacgagaagagctagggtaagagaaggacgtaaacagaacctgacaccagctccttttccttytatacattatttaatacctattaaataaaattatttttggaataaagcttgtgggaacatttgggatctagagaaagtgatatgtgaaattctatctcatatagtcagttaaactttattatttacaagttaaattacacagcagctttacacagcatgagatggaaaggaaggaaggagagaaacgaggagaggaagctggctcctgagattcttggctgcctccacctccttctcttgggcgtagcagtcttcagtgctgcctccactccaaggtcaaggatcagggcttggaacacaggtttaagtcaggttctggctctgacagccccagggccaccagggctcccactagcagcttcttcacaggcgttggaggtgagtgtgaaggcatcagctgcagggagaaaggttaatgccagttgggggaggcacacaaatgttctaccctttaccccacccagccctacctaggactcamtttatctagacgatggcgacaaatgaggccactggaattcaggtagaaagtggagtaggcatcataggtcctggggaatagagggaggcttactgagggagaaggtgactggtcccaaagctgaattcaagcatttgtttaaacgagtagtccctaaattctgctacatattagatcacctgggcaacttacaaacatctcagtgcttargttgtgccctgtctcarttaaatcagagtgtttggcgtcaatattttttaacratccttgggcatttctactgtgcagcagtttgggaactgctggtttaaaaacttatatccaatgtttgtggctgagtctaacaatttattgggattctactcccaggcggaaatttaccaggttgtaaggctcaacatatgagacaggacttttcatttgttcagtacttttgtgtgtgtgtgtgtgtgtgtgtgtgtgtgtgtgtgacagggtttcactctgtcacccaggctggagtccagtaatgtgatcacggctcactgcaacctcaacctcccaggttgaagtgattctctcatctcagcctcccaagtagctggaactacaggtgtgtaccaccacactgggctaatttttgtatttttttgggttttaccatgttggccaggcaggtctccaactccttacctcaagtgatccgcccacctcggcctcccaaagtgctggcattacaggcatgagccaccacacccagtctgttcagtaagtatttgagtacctaccatgtgctaggcactgtataggaagaaactgaagctcagaggtttttctaatatacccagtctctattttttttttaacattaacataaactaaacaggatccctgtccttaaacagtcaagtgaggataggtcaagggttgtctgggagactagatcatctgtaatctcagcactttgggaagctaaggcaggtggatcacctaaggtgaggagttcgagaccagcctggccaacatggtgaaaccctctgtctactaaaaatacaaaaattagccgggtgtgatggtgtgcctgtaattccagctacccaggaggctgaggctggagaattgctggaagccgggaggcagaggctgcagtgagctgagatcacgccactgcactccatcctgggtgacagagtgagactccgtctcaaaaaaaaaaaaaaaaggaactgattatagtttgggtcctttctcatttctctcttaccggtaatgctcgtctttgtcacgcttgtagaaccgcaaaaagagcaagtggacgggcagccccacaagccgccaccgggcttgcagggtccagttctcmgggtggcgggtcagctgtaaaacctccaaacgaaggtgtgcaaaataattccaggccaggaaacggcagagggtcagtgaaagaatgtaccatgtccggcccctgtgaagaagggatgggaaagaaatctcatgatggcagaattagaaaaccaaactggcttctaaggaatggggaacagctgtgagaagcagtctaggaacttctctgggaagtgaaaagggtcatgtatatacctytgggtgcttttcctccccagtgccctacctgtgccccarttctcacttggtacgtatgttgaggatctcattgatgaattccacatccaaggaatacagactgtagtcgtgggactgaaggaagagcttgggaagctaggtggaagaagatggcatcaacccagtgggaaagaaaagataatcctatttttcagttttctaatttttttttttttttgagacggagtctagctctgtcgcccaggctggagtacagaggtacaatctcagctcactgcaacctccgcctcctaggttcaagcgattctcctgcctcagcctcccgagtagctgggattacaggcttgagatggagtctagctctgtcgcccaggctggagtgcagaggtacaatctcggctcactgcaacctccgcctcccaggttcaagcgattctcctgcctcagcctcccgagtagctgggattacaggcacccaccaccatgcccagctaatttttgtatttttagtagagacggggtttcactgtgttggccaggctggtcttgaactcctgaccttgtgatccgcctgcctcggcctcccaaagtgctaggattataagcgtgagccatgtgccaggcccagttttctatttttaaggcctccttactcccatcttggagtgaaagatctcatcccatgattaacctcccttaacccaaaatgaggaacatcattttctttcttttttttttttttgagacggagtctcgctctgttgcctaggctggagtacaatggagatatctcctttcactgcgcctcctgggttcaagcgattctcctgcctcagcctcctgagtagctgggattataggcgtctgccaccatgcctggctgatttttgtgtttttagtagagatggggtttcaccatgttggccaggctggtcttgaactcctgacctcaggtgatccacctgcctaagcctcccaaagtgctgggattacagcactttgagccaccgtgcctggctggaacatcattttctcaggaaaatgtttataatatatttctatgcctgcctcatggttccaaaaaagaatccagttgactatccctgtacgtccaaggattacscacatccttcccactgtagacgaaggccacttttgcactgacttacctcttgtctcagtctctcatacatgacagacagatgttcctccatactaggatctcctgacggggtggcaggggaagggtgggcagttccagggacttggaaaggtatccaagccccaggataggggcagggaggtccctcaaaaaggcttctaagcccatccaggcagccgctatgcaactcaggtcctggtccctcctccccctttcctggagggagaaccacccatgctgagctgagggcctggatctgagggagaggtagtgggggaacctggggaagacgctgggtgggaaggcgtgggggcaggggagaccagaatagaggagaagatggggaagtggttgtcgtggagtggggccaaaggggtgggaatggtagagtccctggataaagctggtcctaaggagaaagaacagaagggagaaagataagaatccacttgtctaacaccccttgatcccctggatgctcaacaggcttccaatacctattcctcctgacagaatggatggaattactataggaaaaaagggatggattcatctccatctctactgaaaacaggaggaaaccattttattttattatttattttgagatggagtctcgctctgttgccaggctggagtgcagtagcacgatctcagctcactgcaacctccgcctcccgggttcaagtgattttcctgcctcagcctcctgagtagctgggactacaggcgcgcgccaccatgcccagctagtttttgtatttttagtagagacaggatttcaccatgttagccaggatggttttcatctcttgacctcgtgatccacccgcctctgcctcctaaagtgctgggattacaggcgtgggccaccgcgcccagccgagcaaactgttttatgtgacataaataccggcacctcccaaaacctagcagacattttacttttttttctttttttgagacgaagtctcaccgtcgcccaggctggagtgcattggcgcgaactcgggtcactgcaaccgccgcctcctgggttcaagccattctcctgcctcagcctcccgagtagctgggattacaggcacccttcaccacgcccggctaatttttgtatttttagttacagatggggtttcaccatgttggccaggctgttctcgaactcctgacctcaggtaatccgcccacctcggcctcccaaagtgctgggattacaggcgtgagccaccgtgcccggcccagtgttggaatcttaaagaaatgtggccgggcgcggtggctcacgcctgtaatcccagcactttgggaagccgaggcgggcggatcacgaggtctaggagttcgagaccagcctggccaatatggtgacaccccatctctactaaagatacaaaacaattagccgggtgtggtggcgggagcctgtagtcccagctactcgggaggctgaggaaggagaattgcttgaacccaggagacggagattgcagtgagccgagatggtgccaatgcacttcagcctgggtgacggagcaagactccatttcaaaaaaaaaaaaaaaaagattccaacactgggggcagtttcacctctcttatcgcaagaatcatgtaatacatacttgatgagttaacgaataacaggttttattgtactgtggattaaatgctgtggcctgtacatctccatgattaagtgtgcgaggcaaatgtacagagaaaaaagaatatccagctgaagctaggaatctgaattctatcatgtaactttaggcattctcattccctatgcctccgcttcctacaaatgtcctataaatgagaacaataaagcctcactgggttatgaggcctatatgaaataatgaatgtaaacaaaacgtagcgacctagaaagcagtacataaatggaagctattatcatttcgggcccctctaatgacagacacaacctcaggagacagttaaaggctggccttcactctcctgggtttaccgacgttgaaactgcaaggggaggtcacccaaagttaggcctcacccgagtccctccgctcccaaggaaccccccaggggatcgtctcactgcagggaaggcgggcggaccgctcgggtacctcggtccccgatggtgtcctagaggcgccgtctctgctgggggcgtggccatcttgccagcccgggcgcaggggcccgaaccgggtgcacactggccggccttcctgccaggaccgctctccgagtgcaagacgggcgggctgctgagggcgccccgcgggtctggtctgggccggggaactccgggacggcgccgcagcagggctacgaatctctcggcccctgcccttcaaatcacctctaggcacaggtaaccgcggagagtcgggcgcaacgcagacgcgccccgctgcctggccttgaccccgcctgaccgccctcaaacctgggaggaccgacgtccttgcgcgacaggcccggcagcgcctccctcccgctcccgcgacccctagcctgtccacgcgctgcagggcacaggtgggaaggggcggcgggtgtctctgcgcctgcgcggaacccagcgcgcgctccgccccacgcaccggctttgaggagggtctctccccgccccctctcctccctccctcttctcctccgctcacctggggtcgagcctggtaggcgcgcaggcaagggccgagacgccgggccgcaccccggctgggctggtacatgatcttccgggagtggagaaggagcctcctgagtccgacctccggcctcctcacaggggtgagcgcgccccagagccggcttcgtgaaggggaaaggaggccggggcgrgggggtagggggggaaggggctgagggagggaaacggagatgtcccgcgcttgcgcactgcaggctcgagggaagcggctgaagcgctctgtcggctgtaagcgcgcctgcgcccgcgggctcggagactgcctgagtgcgcttgcgcaagttacagcctccccygcccccccaagcgctgtattcacagctgaggcctttgagcaaaaagctgagcaaaaacagggctgaaggctgaatgggtgcaacgacagtgaggggtgaggcggctgaaataatgagtcaaatttttcaacagctcttgtgataaaaataaatacttttattggtctggttaaaagatacaaatgacttgaatctgataagcctgctgaatgaatgaatgaatgaatgtatccatctattatgagggttgggctttggctctttcctgtagtgagggagaaataatactttgaagatgtttgacggggctgcggtcaccaaggcctggtgctgcgacgttcctgcaggtttcgaatgaacctggcgttgagtatgtccccacccactgtccaggactgggctggcggggccggggcctgtggaggagctgtgtgcatgggcttctccccagacccatcctgtgacaaggcctgctcctcactggcagacctggtaggtggggagatggagagtgggttataggaatactaaagaggaaattaagattacagactcttcaaggtctcgggccaggttttaatgtaggacacatgatgggtatgaagctggaaccattagtgctatgtccaaatttaaaacctctcagagaatccgtattccaaagggaagtaccagagttgaacctgtgggggaaaggggcttgcaggatgtaaggtagaaggaattgtgggaggagctggtgtccagttcatacaataagatttaagagtaggaagtgactgagaatgatgttaggaagggagtcagatggtggtgggaggctgttaggggaggggtttagacctcacctattctttgtttcctgttctccctgcttggagtcttggttgcctgtggaaatatcaggcatgtgaatgggaaggcaggagtagacagtgaatgtggcctacttgatttgagggtagggaggagtgaatacttacctgtattgggggatgaggaattcacccccccatggcggctgtagcagcagctttgggctaccagacctgggggagtccccctgtagaagaaatgggagatgatggggaggaggctactggatgaaagatgggtgggtatggaggaatcagaggagaggagtaaaaggaatagcacaggaacaaagagaagggggtaattatcattcctaacaggttttaatcaaagctgtgccccagaaaagggcgggggaagttcattttatacccaagattttctggagtgcttctgatttattgctctattctttctagttgaggtaatgtgttaaatctatggctaggtgtgatccaaatcatgtcagaagaacagactcacatgtggtcaaaaatgtgttggatcgggtactctggtgtttggtttggaaaacagggttaccttaactataagattccttagaccaggctgggcgcggtggctcaggcttgtaatcccagcactttgggaggccaagacgggcagatcacgtgatcaggagatcgagaccaacctggccaacatggtgaaaccccgtctctactaaaaatacacaaactagctgggcacggtggtgcacttctgtaatcccagctacttgggaggctaaggcaggagaatcgcttgaacccaggaggcggaggttgcagtgagctgagattgtgccactgcactccagcctggcgacagagcaagactccatctcaaaaaaaaaaaaaaagattccttagaccagagggaaataggaagtgacaaggctgaattttgaatttaggaggaaaaggaagggggcctctgtaaatagggtgacagactgtgttgcactctcaatggaggtaagggtttgtcttgagagagatccagcggtttagtggagcagacgtcaggtaatcagagtgggaagacgaatacaggaggcaggaggtaattagtggatccagagatgttggtaagctttgacatcttggcaaaggcacgcccagagtaaagggtagaagtcactggggagagctggaggttcctggagggaatgagggagtagatacggaagcccacacacagggatccagcacctacatgaaaggagacacagaatctgcaggaggactaacagtgaagatggggataggcagacaccagactcaggagctctgaggctcctgggtaaaagatgtgcagatctcagaagtgagaaatgagagggacagaggtcctgagatcccaggaaaataagggatgacgcacaaatgaggctgacaacttttttttttgtgattctttttttcattgaaaatgtcaatttagaaaacacaaaagatttcacactttattcagacaacactgagagaagaaaagggaagagtgagtaggggagatggggagatccggctcccaaggatttcaggaaacacagtggggcacctgatctagcacacattcagagggtagggaggggaagggatctagctatactctgggcatggagcagggaaggtcgtccttgctatggaggaaaggagagaggaaggacagaggaagagtggtcccccatctcatctcgacaatctcacaagacaggagtatatcgggacctagctaccagggagggatggatgcaagaagggattccaggatctaacagatccttgacactctggatctactctcaagaaacaacctccctcagagaatctggatctgggggaaatggtggtgtcagccaatctcctttagagaccccaaagcaacaccagtttggggttccctgacacctacacaaaatgtggaaatgaagagtttggcaatggtgagtagatccctttgggaagctggtaagtccctgttctacctaactagactgctctgaagcagagcttgctcactagcggccattcgcaggctcaaagggcaagtgtggcaggcagcacaaagcagtattagagccaccagtagacactagagggaatatggggtttatcccatagataaaattccttaaaaagtttccctggcacaggatgcccttagaccttccatggtgttctaaagtttgacagcaagcaagagtgtgcttctctagataaatgtatgagk

SEQ ID NO: 95297 - DNA, 95597 bp, Homo sapiens
taaaatgattttaaacatcaaataagatgatagacttgaaagtatttcaaaaattgtaaaatgtgatacatttcctcttctttttttatatgttatttttatctgaggaactcatataatcgttcttactacctctctccagcctagaaaaaaagagcaaccccatctcatttcaaatgttaattctggcacagcctatatatttcactcatttgtaaatctcttcatrcaatagtgacttctccttttttgactgatacagtatcctaattacaaggttattttgcacttgtcttaataccttaagtgtaataaaaatggcttgagaaaaaaatatggttcatgctaatatgtgacaacatattaattagtttactttttgcattttgtattaagtgaaatatgtacacaaaagagtaaataaaataataataatgcgaatacctaccacacagcttaagaaatagcatactttttccaagtttttggttagagcacatacttttgtgaactaatatttgatgtcttatctcttcattttctgtcattttctttcttttttagaaacagggtctcactctgtcacccaggctggagtacagcggcatgaacatggctcactgcagcctcgacttcctgggctcaagtgatttctctcacctcagcctcccaagtagctgggactacaggtgtgcaccaccatgcccagctaattaaaaaaatttttttttgtagaaacagggtcttgctatgcatgtggaatctaatttttttgtagaaacagggttttacccaggctggtcttgaactcttggcctcaagtgatcttcctgcctcagccaccaaagtattgggattacaggcgtgagccaccacgttcagcctcttatcgcttcattttctaaaaaacacatcatgtcggccgggtgcggtggctcacacctgtaatcccagcactttgggaggctgaggcgagcagatcgtgagatcaggagattgagaccatcctggctaacacggtgaaaccccatctctactaaaaatataaaaaattagctgggtgtcgtggcgggcacctgtagtcccagctactcaggaggctgaggcaggagaatggcgtgaacccaggaagtgggaggcggagcttgcagtgagccaagattgcgccactgcactccagcctgggcaacagagtgagactccgtcttaaaaaaaaaaaaaaaaaaaccatgtcatgtctacagttggactgtcacttataaggttcacctcatgtgtctcctattgaaattctaccttttccatggccttctttcttaactagaattatgaaatttgggtgctggcacatttgatgttttaactctttcaatttactggtgggaaaattaaggcccaagaagatgaaatggcttgctcaaagtcaaacagcaagagcatagagtagaagcaggattctggcttcttaataacataagattagcccttattaacttcctagaatattcatatgatattactatatgtgtcaagtaatcagacatttaattatatactgtctggcattgctcaatactgtttcatgtatgtcagttttgttttcaactaatctttaagttccttttgggcagggaatacatctcaaatctctgtacacgctgcctgagtcttaatatttttataagacttgtacctacaatgtgtcagctactagaccgatcactttacaaacatttttttcatttagtattcacaataattcctgacaggtaagtgctatttttcccaactaactaataggaaactggggccctgagatgctaaggaacctctcagcatcacctaacaatctagtcctgaagccagagttcaaactctagactgtctagatgtcaacccgttcaaccgggttgcttctttgtgcaaatatctagaaaatggaagggcaactatatgatcccattttacagatggggaaacaggaatcagatatgggaagagactttcctaaaatcatgtagttggtaacaccaatgtaaatgttcggatgccaagtccaatgcaccaatataccataagatgttcaaataaatgtctgacctgttgattaccatgttaataaataccttctctcttattgaatttctaatcactcctcatttgttatattatataaaaatactacctgaggatttaatttttaagcttacagtaccaagattatttatatcttttaatcgcacttactgcttttaacctactattaataactaaacttttttgtgaagttagagttcgggatcattcttattaattttttggattttttgtaaaccccatggtgcctaaaacaatgtgtagtatgtgctaaacatattttttgaatgactgaattacagcatttgttctttacatgttgatgtttcaaaaattttttctcgagagaatgtaagttactcaaggacaagttaatcttaactcacccctggctctccaatattctgagcccaaccatgtttacatgataaatgctcgaattttattgacttgaactgaattgacttgataaataaccccatcatccaaaatgtatttatgtgaaagcttgacctgaataaagaagtaacatagtacactcagaatacttttcttgtacaaaaatgaagacatcttggcttctggttccctacagagggatgctttccatttctgaacatctgtaatactaactcactaaaccattcatttagcatttagtatgtattatcttgtactattggtaaattttacatctatatcctctttccttgagtataatgtaaaccccagagttgagactacagttattacctaaaaaagcatggtgtagtgaaaagagcatgagttttggtgacagacagaagtgggttcaaatcctaattcagccatttatcaactttgtgaccttagaaagtattcatttcatctctccaacttgtttaattgtctataaaacagagaaaatacctatctttcagggttattgtaaggattagaagtaatacatttcaaaactgctggcacacagtaacactcaataaatttacaaagaaaaatgtctactataaaaactctttgactcttcaataattaagaatgcccatatatgctaggtacacaacaacacttattgctgacaatataaccacatgctttgtattacgtctgcaggtgcaatgataaaacaataacatacctgttagataagaggtaaactgttttggaccacaacgaatagcgtaacgtgtagttgttctcacagcttttggttcagtctgcaatgcatccctgggacaaaagagggttccatctgatgtttctccccaccatctcactcggacaagtacacaagtgggaggctttgcaatcttccatatgactctattaacagtaagttttagaaaacagcgtagctggccttcaaccagaggtggcaggcttgtagatggagaaatgtcacttaaacctgtagaggaatccaagaaaactgagtcaaaatttagactaaatatagaaaacatataatatgctttttgaatgaaaacaaacagaacactttagtcttaagttcagcaatttatcaccacttagaaagaaggtttatcctacccattattctaatacatgagaagtaactatcaaatcagaccaccgaataatctatctggtcatgtaagccactctgataactaattagtatttaaggtttgatttgatttactctaagttaagaacataccaacaaagacacactaatataaacttttctttagttgagttactatttgaaaaatacaaatatcagaagtagttgacatttttctaagtatggttgaaatttttctaagtacagttgttttaattattgcaacatctatggtttttaagatatgtaatctttatctaactctcttttaaaaaaatcactaacgataaaacagcaacaactcccttcactcacaaacgatttagactatatcatacaactcagcatttcaatgaagaacgtcttaaattgtaacttttctttcctgccaagatcacacagtcagtgaggacacagactatctaatcttcagattctgccactatttttaacacagtgctgggttcatatatttattggctttagtatttattgggtttcataaagacattaaagtgtaaacaaagcaattaatcatgactttctaaaaaattttcctttaatgaccctgattgtctttcattcatagtaccttttcgggaaaacttaaaggagatttaagaaaccattcctatattatttataccttttttttcctttgacttttctttgaggagtggttatgcctcaaagaagaaaatatatggaatgtatcagatcaggactaattatttggacttctaatgcaaacaccgcctctgccctctatagtggagaaaagacccaccataatccttatggatagtttcaacataaaaattatacacagttgtgtatacatttctacatatggaaatggtatagcaaaaagtgtattctgttctatgctatgttatattatttctactttgactttccgattatcaaccaaacatgcttaactgttttgacacagggagcactagtatgcttcagtctcagatcctcctatctttcctggcaggaaagtcagtatctcaaaactgccttagtaatctttaaacagcttggataagagtaattcccagattgtagcttcagtcctcaacccaatggcctaatgtcctatcactgttcccaatacttcttttctcgctaaactgcctacaatgcaaaaaggcagggtcacccactgtcctttttcccttcgaggcagtcttgtagagattcaatgtcaagtttcctgatctgccctgggttcctaggttgactgttctcactgcagctaacatcccctactcggtgagcttgtgtctccttgagctgctaacctgatgaggactctctgctgcacactctttcatgatctcaggtccttcaggagatcgtcatgcccttacccccactccaatcctatcacacctgtcattccccactcttcccggctctatactctacaattatttttcccaactcctgctcatagtcagcccttcatacttcattcattcaactaacatttaccgagtcctgctttgtactaatccttggtcattcagtaatgtataaaacgtgattcttgcccacaatcacacaacaaatgatataatccctttgccaatttatgtttcttcctgtccctgtggacctcgaaagctacacacacacatacatttcacttcgttatcaaaaccaatcccatcattgtttgttcttctcctctacagtcatcctaccggtaaccttcatctcattaatcgcctgtctgtggcccctaccccagcccctaattcctttctattctctggagggccaattgcccttccttttaaccttctggttccctggctacttccttcttacgtcccttttcttgtttatccagcgggggtgcgggtctccctaaaattccttacaccctgctctcctattacgctttcctcaatctttgatcgctcaggttacctctttttttgcgcccacggctgcccccagacccttggccttttcgttgtttcatgatgagcccgagctcttcttcaccagctcaactccgtctccagcacctaagcagtatcctcccgccatccctccccacggcgcctgcgttccccggcaaccggcgccgctgggcagcctgggaggcaggaaaaagcgactcttcctctaacagtctccggaaaacggtgcgaagagaaggcgccaagacgccttccctccaatacactacaatacccaggacgctttgctacaatacctctccggggttggctggggggcgcctccagctgcgcaagcgcatagggatgcgccctttgtggactccattgcgcagggtgcattgccctgaagagcgctcctccttccggtgaaagtcgtcgggttcccagccgggagtctgcggagttctcatactctgttacccagcttcctttgtatgagkgctgttgcgcacttccggtggaagcgctgaagcgagtgggtggagtttacggagccggtgggcggtaggcggtgctacgggtagctgggtgctgtccaaaggcgacagggcgtcgttaggggagcgagtcgtgaccggttgggccacactcaacgtgggacgaagcttcgcctactgtttgactacgtgcgtgcagcctcccctcgatgtcggccctcgaaaagagcatgcacctcggccgccttccctctcgcccacctctacccggcagcgggggcagtcagagcggagccaagatgcgaatggggtacgtgacccataccccttctccctatgggccaggccccagccgttggagaatggtatctctgggcgttcatagaggcacgggaaaggagtctactgataggagaaaatgttggcggcctggagatatttagatggagtagaaggcagattggggtactaggggaggcgccaagtcaatagaaattggaggaaaaataacgttgttgaagggagaggggaatgaggcaaaggttggggaagctgagagactaacataagggatctgagaatcacttccacaataaaggaggcttagaaaagggagtagaacggtgacaaaggtggaggagaatcggccagggaaggtggagggaagtggggaatgactgagagaaaagttgaggggaattgggccaacaactaaggaaaggtttgggaggagtagatattatcagagttctaatatctgcactgtgagaactagatactagaaaagctgaggggggtagaaaacactcgagacagggctggagaaggaaagaggagaactaggaagcagacgattctagagaattcccagaggtgtaaagacagattcagcgaatgagaggtgagattaggtctcttaagggagaatgagaaagtttagggagtaggcctaaggtaaggtggagaacatagccacgaagattgttaagggtagtaggaatgtgctgagaagctggacaggataagggagagagaagaaggagaggactgaagaatttacagagtgagaagctggacaggataagggagagagaagaaggagagaactgaagaatttacagagtgaccataggctctaaagattgagagatgactataaatacggtttggtgaatggaagtgctgcagttgtaaggtctgggaagcttagaggaagatttgggcaatcagtttttgctgggctagtagatctgagggaagcgacgtactggcctaagactttgaattagtgaagcattgggagttcgagaaatagtttgctggaaaggaaggagagccatgtagaagagataggttttggaattttagatcgttaaatggcttgtgccaggttaggggatacttgggccgaggagaaagaatgaggtgaacatgggagaagtaattgctggaaagtggagagaattgaataggcatttggttttgaggggatatttgtagtttcaaacaggattctgggaattagtgactgtaaagagaaaaggagtaggaaagatacttaggtatgagggctccagagtatatttgggattctagagatgaattggtagatattctttgaaaaaggactacagaagagaaaccttaggttctgaagaagtaatatgtgtaaaaacttatcaaaaaggaggcgagagtaggagatgcagtactgtgacagtaagtcctagggatgaaaagaaaggagaatcctataaaacagtggggtaaaggaatgggaaaaatgggtggaaaaaccagggaaggaaactaagaattgagtggagacctgctatgatacgcagtagaaaaatgagaaaactttagcaggaggagatagagagatagacgcacaatagaggtagaaggctacatagaaggtaaagtgaagattgttttggctttggaagacagaaaagttggactataacatgaataaagagaatttggaaactgacccataacattatttgggaaaactaacctggagtttaatattaatgtaacattaattgttgttaaatatcttagttgctgcctttcttaaaataaatttgatttttcagtataccagcacccttctatacaaatacataagaaaatcagatttttaataattatacattccttagataagcttaattagagctcagcttctcatcttggagaaacaagttctctgaagattgaagaactgaatgaagatactgagagaaaaaaaaaggaaaatctgctgattagaagattgtataattgttagtaatttatcgtttttattttttattacttttcattttatttttttttagagacagagtctcactctgttgcccaggctagagtgcagtggcacaatctcggctcactgcaacttccacctcccgggctcaagtgattcttgtgcctcagcctcccaagtagctgggattacaggcatgcaccaccacgcccggctaatttttgtatttttagtagagaggggatttcgccatgttggccaggctggtcttaaactcctggccttaagtgatctgccccacttggcttcccaaagtactgggattataggagtgagctactgtgcctggacaacttacctttttaaaaagatgctttggtcttcttggtttaggttaactgcttatcctggaaaagaaagttctttagaaaggcctttctttatgatagtattgtgaagagaagagcatatattggcgaatatttgtgtggtcctcaaatggcttattttcccgtatctttcttttctactttattggtatataagcaggcttcatctaagtctcatggtagtaataatatagattctctttctccttagaatcataaagctgagagaaagcatagacatggtctcatttcaccacttcatgtagttgaggaacccaatattcagagagttctgtattctataagggaatgtattaataaatgagggaactgagactcagatattcctaaggtaccctagaagcttagcggtagggccgttaaggactaggacttgggtctcttgactgtgagacccattgtgtattttggagtcataattgtcatctggggatacttattttgagttgtgtatcttactcatttgcatataatctaggattcagtctttttcttcagtcgtaatttatgaagtctcacaccaatttcaaagcattctttatgtctccttatgcttacttgcttttttcttaacttccattcttccactctatctatgttactcacaagttagtcctgttctcttgatagtctcttgtgtggcttactcttaactatttttcatgatctcttgccttcaatttcactaaacattatttaggcatgtttgcatattcagggtgcatattctgagttggtgatttttcatgagtttccataattcagtttttcagattagatttagtaattccaaagtattgttggataatttaataatagcaatttttaaagtaagtactgtgtgccagacattgtaatggtaactttatgttatttaatgtgtccacagacctgcatggtgaatattttcctgcattgtgggtaaagacattcagacccagagattaaaagtaacccaactagtaggtagcagagctaggattcaatctaagtttagtctctagaatccattcacttttcagtacactaatattttctcttgggtaaggcctgaaatcctggtgtcactcttccttttaatagatgccaatggatgttgccaaaaacagtggttttgaacttctttattaaagcttttagagctactctgactaaagtagatttgagatccctatttgctttgcacccctggtgtgcttgagagaagtatcttttgaaagtcactgctttcgtatatactattactattagaggaactataaaatattaaagccattcattattcaacgtgtttttggtttatcagtagttgtactttttggccaggtgtggtggctcatgcctgtaatctcagcactttgggaggccgaggcgggtggatcacctgaggtcgggagttcaagaccagcctgaccaacatagaaaaacaccgtctctcctaaaaatacaaaattagctggcgtggtggcacatgcctgtaatcccagctactcaggaggctgaggcaggagaatcacttgaacctgggaggcggaggttgtggtgagccgagatcgcgccattgcactccagccagggcaacaagagcgaaactccatctcaaaaaaaaaaaagttctacttttctattattatctcttaaattcctttttttttcttttgcaagagatagagtcttgctgtgttgcccaggctgaagtacagtggcttttcacaggcataatcttggtgcattacaacctcaaactcgtgggctcaagcagtcttcccacttcatcctcttgagtaggtaggactgaggatacatgctagcatgcccagctctgtagtgatttaactgacatgtatatagtagtccctttttatattctatgaggtaaactagggcaggagttaatattttcttttaataaatgagaaaactgaaatgttcattgacttgcctaagatcacagaatcattatgtggcaggaacaacattcaaacccaggacttcgtatttttagtccattgttctttctatagcttgcattgaagggtttgatatttgaagtgacaaagatctaagtttgaagcccaacttaggtatttacattggtcgagtcatttaacttctcatagtctattttcttatctctaaaatgagaatacttctgcttacctgagagtgctgtgagaataagataatacataaaaagcacttatagttcctgacactgacacataagctcttaaagaatgatagctagtagataattatacattgagaactgtgaagaaggttcatagtttatgtggaagctctcctttcagtttcttatgttatcagcttttttgtccccacaagctgtatgtttattcatatctgattagatagtctttcatccatcttcttaaatttattatggatatcaggcctcttaggaaggctttaatgagctattcacacagatggggaaataaagggcaaagtgaagtgatttgctcaaggtcacaaattgagttactaaaataatcaaatcccagtatttctgtttttttttttattttttcattagatttttaaaaagttaaatttatatgccatagaattcactcttttaaatgtacaattcagtgatttttggtatattcactcagttgtacaattaccaccactaattgcagaacattttcatcctcccataaactcgttactcattagcatcttcccttcctcccagcatgtattgcttctggatcttgagtcacagaaaggcttttccttttttkgggttataaaggaatcatttatattttttcctggtacctgtgtagtgtcctttttttttttttttttttttttgagacagagtcttgctctgtcaccgaggccggatggagtgcagtggtgtgatcttggcccactacaacctccacttcccgggttcaggcgattctcctgcttcagcctcccaagtagctgggattacaggcatgcaccaccacacccagctaatttttgtatttttagtagagacggggtttcattatgttggccaggctgctcttgaactcctggccccaggtaatccacccacctcagccttccaaagtgctgggattacaggcatgagccaatttttttttaatccatttgaagtttatcttgatatgcaaagtgaggaaaagaagacattttatttttatccaaaggctatctagttgttttcatcatttattaaattttttagtcctttacccattacgtaaatttcactacaataaagaaatagtcctggccaggctcagtggtccatgcctgtaatcccagcactttgggaggccaaggcatgtggaccacttgagcttgggagttggagaccagcctggacaacatggtgaaacctcttctctacaaaaatcacaaaaatttagctgggtgtggtggtgtgtgcctgtagtcccagctactctggaggatcatttgagtccgggaagcaaaggttgcagtgagccaagataatgcccctgcactctagcctgggacacagagtgagactttgtctcaaaaaaaaaaaaaaaagtcttctttctcactgattaaaatgacacctttgtcatatgccaaatttctatataratccgggtctgtggagtttcttttacgtgccactactgtacttttaattagaggatttattaatatgttttgatgggtggtagaggttgtttacccctcattcattttgaggattttcgtggttcctcttgtttttttctcacaaataaactttctaatcccatagactagtgccagaaaaaaatcctgatagtatttttattgggattacattaaatacaaacattaatttagaataaacgtttttatgatgttgaatgttccttgaagaaatatggtatctttcaatttgtatgaatcccttttgaaggaaatatatttcagattccaagtattgacctaagttatattcaatctaatattacttaaattcaatagtactcttaaataattgtgaaactcagtagatttactctttaaatacaattaagtctacaaaaatccccaaactcacattagcaacattatattgatgtgaaacaatctaatttgctgttatcagtttactgtagtttaaactacaaggacatttattattgataggatgttccagggttcattcagttgctaaacaatttcattcaggacccaggctgtttgcatcctttcttttgccatccttagaatggtggcttttccttctcttgcttgtcaccttatggttgcaggatggctgctgccactctacttctatcttatctttacaaataaaaagaagcgggggccaaagtcctttcctagctaagcttgtcttttaattttttcccagaaatgcaagctccccaacagatttttcccttaagtcttattgtccagaactgttcacatacccatcctaaaaccaatcactggcagtagggaatgggattaactatgactggtttagaccaattttgattcattcccttggactggaggagagacaacaagagatctccactagctgctcaaacaaaagtattacaattctgttagggaagagagagtgggaagtgggcaggtaatgtctggaatagagaataaacagcatctggcccaaatcctgaggttaacaagtggagaagcctaatcttctgatttcaacttccctactgttttcattgcagtgtaagtataggaagtaataatcccacccccaactcccctgccccttattgccagatttcagccccttgacattcatttcagaacttctgagtaaaagtccgtttttccattgttgcttattgccagcaaatctatttcttcttagtatctccmaaattgggtaatttgctcttttgttttattttaaacctaatgagccttccatgttatgctacttgatgtcagatttcagaaaacatctctagttgtttgggaaagactgtttccttcaaactacaaaatagtttttttttttttaagagaagaaacttttaattaatagtyctattaagagggtggccacacttagatattcttcaaatacaatattgattacaagttacaggtatattctaccaatatattttgaagattgaataagagattatattgaaaattccaatcatttcaaaccacaccggaagaccgaagttgtttacttatcagtccttttcctatatgcttctgtgtgtgtttttggccatagactttttccaggtttaagtagacatcctctctctgccactaacaagttgtatgactctggtcagtttctcttcctgggcctcgttatcatggaaagaaagaacgctttggcacctgacgtacttgtttaaatccaagctccccagcctgggcaacataggaaaaacttgtctgtactaaaacaaaacaaaacaaccaggcatggtggtgcgcacctgttagtcccagctacttgagagactgagatgggagaatcacttgagcctgggagtttgaggttgcagtgtgctgtgatcgtgccactgcactccagcctgggagacagaatgagaccctatctctaaaaatagtaattataaaataaaaagtcaaatccaagctccggtgctaccaaaaatggctctgggaaagttatttagtatttctgagtcaccttaaaatgagaatactttaatggtactgttcaaaaccatgcttggtacgtaataaacacctagttgtttcctttcataaagtaagatttgagttagatgatctctaacagcatgattcatgatgtagtttttagaatcctgaagtctgctgcttaatggcatgccttggagtaaggaacacttcagacctaccacaaccctcagccagccatctggttgctttcttttcattctcttcaaagtactgctaataaggacattttaaaaacagtggtgccttgatttaaatagctggctgcaattaaacttcagtatttagcctccactaccagactcctagactttgacagaatttgtgacaacaagtgattaagactgctactgtgcccattcatgactcatcaataactctcttaacagacttaagcagcctagatgttgatgtgttattcctatttagatttgagacattcatgtaaaaacatacaacttacatttcttggttattgttctctaggcaaggaaggtttttcctccttccctttctcccctttctctccttcctcctggctttccttaggatttgatcatataattttgttggttttggtcattatctcctagtaggcatatcacattgtagacaagcagaacattctctattctccttagtcctctgaattgtaattattggtcaactgtgtattcctcaaaactgttgaggttcataagggtaggaattgtgtctgaattttgctggtgcttagaatgctgtctcctttagtgctaactgaacgagaaacccaaatcctggcctatttaaccccgttctataagaacaacgttatttccccatcagttcccttaagatggtataactagggctatactgcctttctcctaaaagcggttatacttcatagaataatagaatctctatttcaataccagcttttaggtaaaatgtattgtgtttacaatatgttactttgagatttaaaataattatatggtcgaaactcttgtaataggtcttgtaataggcttgtaataggtctcatgatatgtacagattcaggcttgttacttttattttatcaaaatttgacaatttatgtcttcctctttgattccccaaacctgaaagcaagtccactattataagacagcaaatgtcaattagcaattattttcacactagccttattttatagtattcaatttttctgcccttgcccaatttatcacttattctctaagagcgaagactattttccaagcaccttcaccaagtttagggaccagagcaagtggtccaccattaaaggctagtgttaaaagcgctccaaagtcatgtcctaagcagtggtaatttcctaagtgtttcttgcacttaacaattgccaagtttattttgttggcaatgccttccattttcttcactttttttttttttttttttttttttgagacggagtctcgctytgtcgcccaggtcggactgcggactgcagtggcgcaatctcggctcactgcaagctccgcttcccgggttcacgccattctcctgcctcagcctcccgagtagctgggactacaggcgcctgccaccgcgcccggctaattttttttttgtatttttagtagagacggggtttcaccttgttagccaggatggtctcgatctcctgacctcatgatccacccgcctcggcctcccaaagtgctgggattacaggcgtgagccaccgcgcccggcccactttttcaactcctatccatctttaaaactcatgaagcactttcagactactttagttcattcatttgctctctcttctctgagcacctataacaattttggcatctccactcatcaattgtttgcattggtattgtactttttcactgttactgtgtcagacttatcgaagataattttatgcagatttttgtgtgtttcctcaataacatttagaactcctgtagtgcaaggacctttgtttctttgtgctttctactgtaacacagttaaatgtttttgtaaaatttaatttaatggacacatagcacaaattcatttaaaataaagttctgaggctttttctgatcagtccagcttgcaccgatttttctattttctgtcctttggtggcacctgtcattttaccaggaatcagcaaacattttctgttaaaagccagatagtattttaggctttgtgggccatgttagtctctgttgcagctactcagctctgctgttttagagtgaaagtagccacagacaatatgtaactgaatgtgtctgtgttctaacaacactttatggacactgaaatttgaattccacataatttccacatgtcattagtctctcttctccccctgccctccaccttttaaaaatgtaaagatcattctctgatcctgggccatgcaaaaataggtggtgggctggatttcccgtaggctgtagtttgccaacccagttagttctatacttctactgtcttgtagtagaaggaaggtaggttttaaaatcaacaaactaggattctcttcctggctttactacttaccgcttaactggtgcaaacttgactttatttttttttaaatgtagataataatgctagcctcatagaatttttgaggagaaaatgagatgatttatgtgtagaaatattatttaaattggaaaactgtctaatggaaacttactgtatttcctcaattctaagatacatttcttttttacatttaaattgataatgtctttttttttttgagacagagttctcactctgtcacccaggctggagtgcagtggcatgatctcggttcactgcaacctctgcctcacaggtccaagcaacccttctgcctcagccacccgagtagctgggtttacaggtgtgtgccaccacgcctggctaatttttgtatttttagtagagacagggtttcaccatgttggtcaggctggtctcaaactcctgacctcaagagatctgcccaccttggcctcctaaagcattgggagatagtgtcttaacaatgctgttggtcaggtaacaattctaacatggttctcattgcctgaacataagtgaacaccaaaaccagaatcaaaatttacaaaacgtatacatgttgagaacttcttagaggtaaaactggactgctcttttaaccactaggaactgaatgcttgtgaggaggcgtgggtgttcaatcgggtgggttgagcaacattcctaaagtgagagtcaaaagtaaggctgaggccaggcaccatggttcatgcctgtaatcccaacactttgggaggctgaggtgggaggattgcttgagctcaggagttcaagaccaacctgggcaacatagctagaccttgtctctaccaaaaaaaaaaaaaaagtacgggctggtgcagtggctcacgcttgtaatcccagcacttttggagttcgaggtgggaggattgcttgagcccaggaatttgagaccagcctgggcaacatagtgagaccacatcgctacaaaaagttaaaaaattagccaggcatggtagcatgtccctatagtcccagccactggagaggctgaggtgggaggatgaattgagcccaggaggttgagattgcagtgagccatgatcgtgacactgtactccagcctggatgacagagggagaccctgtctcaaaacaaaacaacaacaaaaaaagtaagatagctctaaataattgtaaagctggcatatgaactggtgtttagttatatgaaacattccatcaccaatgttcttgtgaggcacagaaaactatattggtccaagtgattcaaaagagagtgggactccaactatgaagaaatggtcaggaataccttaagtattttattctgctttcatttatatatattatatatatgtctccataagtaatatataatggatctatataagtgtaaaagagctatttcttctatagaaaaatagaatgaattcttttttatataaaaaatgtaaaatgaattctaagtgataaagtattgtgtcatacttgatagttctttttcttagtttttcatcttacaaattctttttcttagcttttcatcttacaaattgatggtgccttgtacatactgtatttcatctattctagcaacaagattgtgatctgcttgtttagttttcttaattgtaaactccttttgtatgttatttacttgtcctaaggcagttagcatttaggagctcaataaacatttgttgagtgaatgaatgacactcagatgcaatggaaacatcacattttcccaatagcaatagttkagaattgtccatcctgaatttaatagagaagtaaatgggagggaggagccatagacttagagtgaaatttaaaaaatatgattattgaaagcttgcaaaaatgaactcgtgccctatttatattcttttgtgattccatatttatatctctctgtctttattcttttaagaaatatatcttaggtggctgtgaggattaaatttgtataatgcttataaagtgcctagtacatatacatgtctagcttgtttcatttaatccttttcattcctttaattaaacagcttttccttaagcataagaaccattgttcattatatataaaaaccacttttaattgagtttttctctgttaattaactgaactatattattagctgggtttcataaaaaatggcattttagcatattatggataagtaggcttgggagtggagctactcatagaatttaccaatattttataacactgttgggagaaatgtgtcttggtattcccaccatcaactcatttttaagttggaaaatctctatactaacattttttcactgattattgggaattctaatcttttgtgggtaattagaggatttgtacttttgcctcttccctaaccagattgatgtttagtaagggtggtactttaaatttttatagcatttgatttaacaaaatcttcacgccagatatcatccttgtgaatccttttcccatctaattatattaacatgtgttccacaagaaagactgggtgtgccgtttatgagctctgatggattatttcatagccatagtgtacagtgactgtttacctatttcccccctgcatgagctctttgaaggaaaggactaaattttaatcaatgggaacttctagtctgcttgtttccctagtgcctaggaagtatatcagggcctgccatgcaggatgtactcaaaatgtctcttcaattgaattgagattaaattagctgcttatataagcaaattgtgactggaaagaagctctgaaatgattgccctaatgatatttactgtttgcttatgaagtatgtcttttttttttttttttttttttttttttgagacagagtctcactctgtcacccaggctggagtgcagtggcgcaatctcagctcactgcaacctccacctcccggsttcaagcgattctcctgcctcagcctcctgagtagctgggattacaggcacatgtcaccacaaccrgctaatttttgtatttttagtagagatggggtttcaccatgttggtcaggctggtctcgaactcctgacctcgtgatccacccaccttggcctcccaaagtgctgggattacaggtgtgagccaccgcgcctggtctgaagtatgtcttttattctagatcatcatgacattcagatgagtctggggaggggatcgtatggctgttggtctgaaatatacttcattagaggcttttatatgaacctcattggtttttaaacttgaaacctgcttgttttcttgctgttttggcagaatagtagcttacataaatgctgactattgggtaatgccacacacgttgattttgagggtaagcaactgcattagcctttgcaaaacatcaaaaagtctgtattctgtctgttctcttgctttcattaatggtgtttcagtggctttttttttkgtttgaggccagatcattttagaaaagtkgtcattatatcytttttttttttttttaacttttcgagttgtagaaaaagaagttaataattatgttgttttcctgttgggtgaaaggtggaaataaaatttagaaaatttattttctaatttaggcaaagtacaattctttattatcaaaggtataagattacacctgttctccctgtgctacagcagtctgtgtttatccatgcactttaagcaaagtatatttttatgtggtctgactcagcaggttggaagttcctatggcttaagtatcttatctgaagatggttttaagtgaggtaaggtttcatttatttgcttgaaagcacatcatatattgggctgtacgtgtcctgttctgcttaatgcaagacattttgtgaaatgcttctgtttccatttttggattccacgatgctcaacacagaaaagtaatagtaatgggagctaggattttcaagcacatggtaaatcagtatttaataaattagaactctttaagaaggccttctgtattctctgtctgtgaatggcatcaggaaaacttgagagttttccttgattcttccttctcacttcactcttcagctccctgtgatcatgatcataatagttctaaaccttgactttgttcttagtctatatggtgctcaaccttgctacaaggttcttctcccaatcattactatccctacagcaggaaccagtcctcttcctagggattttcagggtgttcattgccagctttgatgatttcaagaatggggaacttaatattattttgaggatagtattgaaaatggtaaggaaataaccctgagagtcagattctagctcagctacttcccatggtcttagacaagttatttaaactccattggccttagttttctcgtttggaaaatggggataataatagctaccccagaggcttggtgtagaaattaattcctgtgtttatctccattgtctcctcaaatttcattaagttatagtaatttggaaaaaggaataaagctaaaggacaaagaagagtagggatataagatgctaacaaaatttaggaagctagaaagcaagttgataaatatttagaagagaaaactgaaaactacttgtagaaagagaatgaaagtgcaagctaatccatatcactatcctataaaggctcaagaattccaggtactaggtgcctgtgaaagggggcttagagttttcttctaagagttttctagttttggctcatacatgcaagtctgtgatccattttgagttaatttttatgtatgatatgaggaatgagtccaacttcattcttttgcatgtggatatccagttatcccagtatgatttaattgaaaaggtttcttttcctatacagttatcttggcatccttgtcaaaagtcaattgaccataaatgtatgtgtttgtttttgaaccctcaattctatatcattgatttatatatcgatcagtatactggtactacactgtcttttgattactgtagctttttgtagtaagtttcgaaatcaggaagtataatgtttccaactttgttcttttttaaaaaacttattttgggtcccttgaatttccatatgaattttagggtgagtttgtcaacgtctgcaaagaaaccaggtgtaattttgataggcattgctttgaatctatagatcaatttgagaagtattgccaacttaataatactcagtgttcyaatccatgaacactggatgtctttctttttatgtcttttttaatttcttcaacagtattacatagttttcagtgtttaaatcttgcatttatttggctatatttattcctgcatattttattcttatcagtggtattgtaaatagaattgtcctcttgattttatttttggattgttaattgcaaattacagaaatacaattgatttttatatattggtcttattttctgaaaccctactgaaattgttcctgtggtttttttagtggattccttaggattttgccctacacattttaacatgtataggtaatatacaagtccaagtttaatcaatatctctgctgttcttctgaaataatacaatgactttagcaacctgtggcaggtggaataacaacatccccaggatgctgaggtctgaatccctggaacctgtgaatatgttattttacatggcagagaggaattaaggttgcaaatggaattaaggttgctaatcagctgaccttaaaataaagagaatatcatggattatttgggtaagcccagtgtaatcactggtgtcttttaaagagaaggaaacagaagaccaagtcagagcctgagagatttgaagatgctgtgttgcttgccggctttaaagtggaggaagaacctgtaagccaagaaatacaggctgcctccagaagctggaaatggtatttagacctctcaatctgggcactagactaactcattgctactattctggttattgcttataggcctttgtagtagacatatctagaatcgtgagttcatattgatatttcttcctttttctcttttttttttttttttgagatggagtctcgctctcacccaggctggagtgaaagtggcactatctcggctcactgcaacctccgcctcccggtttcaagcaattctctgcctcagccttctgagtagctgggattacaggcgcctgccaccacacctggctaatttgtgtatttttagtaaagatggggtttcaccatcttggccagactgatcttgaactcctgacctcatgatctgcctgcctcggcctcccaaagtgctgggattacaggggtgagccactgcgcccagcccatactgatatttcaaaaggaaggacaaaaggaatcaagcgttcaccctgacattttcatttcaaaattaagattatagggttttttacttttttgatttttatataattatctcttcccttaacaacgaaagtcttggttcctaatgacattaacctaactacctatttgctttatccaaatatgtatgtatatggtgctcaaaataacaaactgtgctaccattaaaaataaccaacaatatgattactgaatactgtttaaaatttattttcagttcttttttttccttaaagtatatttatcccactaaagatgtgcagtcaaataattgtttttaaagtcacttggaataattcttaatacaccattaaggtaatttgttctcttttatgttaattgtggtaattgatttgtacaaagtgtttaacatgcttataaaacaaaaattatttacatgactacaatgttgaagtataaaacaatatatattcaggaaagtatagcttttttgtttgtaatatcctacaagtaactattttcattagtctctgcttttatcaatgcacttcaaaatatgtaaacatacagttatatttcccccttacataaaagataacattggccaggtgcattggctcacacctgtaattccaacactttggtaggccaaagcaggcagatcacttgagctcaggagttcaagaccagcctgggcaatgtggtgagaccctgtctctatttaaaattaaaaaatataataaataaataaaatagcatacatatggttctgcatattgctttacttatttatttatttattgagacaaggtctcactctgtcacccaggctgatgtgcagtggcgtgatcatggctcactgcagccttgactccctgggctcaagctgttcttccacctcatcctccttaatagttgggactgcaggtgtgcaccaccgtgccccctaatttttgtatttttcatagagacagtgttttgccatgttgcctaggctggtttcaaacccctaggcttaagcaatccacccacctcggcctcccaaagtgccgggattgcaggcatgagccactgcacctagcttgcacctggcttgcctactggtttttaaaatttaagatattctaatcacttcttattagtacacagaaatcttttccattattttccctgcagttgcatagtattctgttgtatggacataacccagtgtattcagccagtctcctgttgatggccattgggtgtttttcatccttttctctttcaaatagtgctgaaatgagcaaaatttactcatatgtcatttagtattttgggggttagggccacttttaagataattgtctttaatgttctacagttttaccataatgtattacttctctttaaatcttgtgattcactgggcttcatgaatctgtagtttgatgtttcctcagttctgaaaacttcagccacaggttaaacattcctaatctgaaaatctgcactgctgcaaaatctgaaactttttgagtgctgacatgacacaagtcaaaacagagcaagaaatgatgtcagtttataaaatgagagacagactttcaagacaaaaaccattgttaatgaagcagatgactggaaaaaaatttttagaaagccacctagcagcatgcattctcatccctagaggacccaccttctggtcccttgatagggttagaatgtttgtcccctccaaatcttacattgaaatgtaatcaccaatgctggaggtagggcccagtggaaagtattgggtcatgggggcagatcccttatgaatggcttagtgctatccccttggtaatgagtgagttctggttctgagttcagtcgagatcaggttgtttaaaagagagtggtgcagatccctgctgtcggctcccactcttgccatgtgatgtggctgctccagctttaccttccaccgtgattgtaagcttctgaagccctcaccagaaacagatactggtagcatgcttcttgtacagcctgcagaactccaagccaaaataaacctgttttctttatcaattacccagcctcaagtatttctttatagcagtgcaagaatggacaacacagaaaattgataccgaagagtaggatgttgctataaagataactgaaaatgtggaagcagttttggaactggataacgggcagaggttggaagagtttggaggactcagaagaagacaggaagatgaggaaaagtttggaacttcttaaagacttggttaaataattttgaccaaaatgctgatagaaatatggacagtgaaagccaggctaatgaggtctcagatggaaatgaggagtttattgggaactggagtaaaagtcatcatgttatgccctagcaaagagtttgcctgcattgtgttgttcatgccataggaacctgtaaaaagttgaacttgagagtgatcaagagtatctggcagaagaaatttctaagcagcaaagcattcaagaggtgacctggctgcttctcacagcctggtatcagatacaggagcaaaggaatgacttaaagttcgactttataggccaggtgcactgggaggccaaagtgggaggattgtttgagttcaggagtttgagaccagcttggacaacatagtgagacttcgtttctactaaaaataaaagaagttatcagctggatgtggtggtatatgccagtagtcccagctagtccagaggctgaggcaggatgatcactgaagtctgggagattgaagctgcagtgagctgtgatcatgccactgcactctagcctggacaacagagtgaaaccctgtctgaagaaaaaacaaagttggtacttattttaaaatgggagcagactgtaaatgtttggaaaacttgcaacctggccctctggtagaagaggaatccaggagggctttggagtaaccacttactagagagatttgcatgactaaaagggaaccaattgttaatatctaagacaatgggggcaaggtttcaaagttgtttcagatgtctttgggaaggtccctctcatcacaggtccagagacctaggaggaragaatggtttcagggcccaagcccagggcactgctgccctgctcagcctcaggactctgcaccttgtatcctggctactcatgctccagccagggctcaaaatgccccaggcacagcttgggccgctgctctagagggcacaagcactgtaagccttgaccacttccatgtggttggtaagcctgcatgcacatagaatgcgagagtgaggaaggctaggtagcttctgcctagatttcagggcatatatgagaaagccagggtgcccaggtagaagcctgctgcaagggcagagcccctgcagagaaactttgctagggcaatgctgaggggaaatggggggttggagcccccgtcaaagaccccactggagcgtcacctagtggaattgtgggaaaggggctgccacacttcaaaccttagaatggtagagccaccggcagcttgcatcctgagcatggaaaagctgcaggcactcagctctaacctctgagaaaagctggcagggctataccctacaagcaataggtagagctgcccaaggccttgggagcccacccctcacaccagtgtgccctggatgtgggacatggagtcaaaagagattatttttggagctttaagatttaatgactaccctgctgggtttcagactttcatagggcttgtagcacctttcttttagccagtttctccattttggaatgggaatgtttacccaatgcatgtaccaccattgtatcttggaagtaaataatttgttttggttttacaggctcataagtacatctcaggctgcttccaccttataggtggaaggagatgagtcttagatgagacttaggactttggacttgatgctgaaacaagttaagactttgggggaactattgagaaggggtgatggtattttgcaatgtgagaaggagatgaaattgaggggccaggggcagaatgatatggtttggatgtttgcaccctccaaatctcgtgttgaaatgtaatccccaatgctggaggtggggcctagtgggaggtgttggatcatggatgcagatccctcatgaatggtttattgccatcaccttggtaatgagtgagttcttgccctgagttctctccagatctggttgtttaaaaagagtgtggcacctcccccttctcttgcttctgctctcaccttgtgacacagatgctcccacttcaccttccaccatgattataagcttcctgtggcccttaccaggaacagatgctggtaccatgcagaaccattagccagttaaacctttttataaattacccagtctcaggtattatgttacagcaagaacagacttaacacatccctcagctgcttctgatgtttcttctcacctaaaaaaataaaataccgtgttcagtaactttttaatcaaacacaacattgtaggtgggagactgaaagcctgccattgttggttgttgcttttatttaataactggtagaggtgttctgtgatgttactgtgctggttggttaccctgagtacattatgttttttcactgtattaatggtatgttgtatcttttactgttaagtacttatgtgtgaataagtgtaataaaaatgattattagtaacgtgtaagttcaatcaggaatgatggtgatgccaaacaaccatagattttccacatgggtggctaagatagtgacaccgttgctttctgatggttcagtttacacaaactttgttttgtgcacaaaattattaaaaacattgtttaaaattacctccrggccatgtgtataaggtctttattaaacataaatgaattgtgtgtttagacttaggtcccatctccaggatatctcattgtgtatatgcagataatccaaaattaaaaaggaaacaataaactgaaatttgaaacccttctggtcccaagcattttggatgagggatactcaacctgtacggcctcttcaaatactgcttttatttcactgtctttatttcctttcagaacttcagtttgacatatttaagacttatttactcttcccttcatatttcttaacttttgtattttccatcttctatttgtattttggattctaaatgtatctagatgtatctgaacaaattcactactagtttacgcttctccttagctgtgtctaatatgttaaacttgactatttgttttttaattttaattcttttcattctaggagcttgtttcaagtttctgttcatttaaatgtgttaagcagttattttatattgtatttgataatttctttatgtgaactctttacaggtctgtttcctcacgtattttatgctttttgattgtgagatggtcatttgccttggaactttcttaaagttcttagtcctagaatgaagattgattcttcaaagaggatttgcctttgtttctcttgggggtcctgagggcactaccagttggatccactttacattctcatcttgaaacttcttgggatatgtaaatgatatgtatttagctccatatcagtttgagagctgtctttgttttttcttgcttctcccttctcaatgctaagttttaagacaggcctttttttattttattttttattttttaatttaatcctgagattgtggtaagaagcagaaagttaattctgtttcagcctttcactgagcttatgattctttgggatcccagcttgatggagaaaggtttcctactgggctccgcagcaagacttcccacctcgggctttgtgtcctgttctgtgtgcatcgcaaaacttcaagttcagacagttggcaaatgccatcaaggtaaaagccagatttaatggtctaagtgcctctctggattcccaccttacttaacttttgacctgggtcttccctgttccttactttcttgccagctcatctatgcgtttaagaagaacgaatgactatataattacaatatataagatcattatatataattatttaataattatacactatgattgtataaatataacatctatttatataatatttttcacacaaatacttacatataattttagccaatatttctcaagttggatctattaattaccatagacagaagcagtccctaatataagatgtctatactcaggcagactgtcagtcattgtgtgaaaatggggaacgctattttcaacatgcaaagtttcaaaattaatgtccctttctcatgaagctgatggaggatgtgtttcatcaaaataagagactacaacaagaaaaatatgggatatgggataagggattcaacacaggtgaaaggcaagaagaattcctgagatgatactaaattgttagcagttcattatatcagacagcaggcagtcctatttggagcagatgaatggaggatgccagaaatggaaatttgagtgaaaaatagacctggtagattatttaatgtgaatgaccaaatattaagagaagttttacagaattcaaaggctttatttgtttaaaattgtgaaatactcatacagaaaagtaaagtatatatgtacagttcaaagaataataaattctcatgtgtccgtcacctagcttaagaaataaaacattatcagcaccttagaaacctgtttgtctctcctcgagagcatctctgtttcccacactggtattgaattgcatgataatcagtgcctggcttttctttattgttttaccacttgtgcatgtatacattaaaaatacattatttagctttgcctgtttttgaacactattattaatggaattatacaggattcagtcttctgtgcttatttctttctctaagtatttttcagattcatgtacttttaaatttattttcactgctatgctatattctattacccagatacatcacagtttgtatattctattggtgatgcatatttagcttgcttcttattctttgcttttatagacatgtgtctacaaacattcttatatgtgtgttttgatgcctatgtgcaggaggttctctgtaaagtaaaattaccaggttgaaggacacctgtctaattttattaggtgatgccttacagttttccaaataatcttccctgtttccttgttaatacctgttaatgtctggcttcctatattttgtcaacatgatggatgtgaaatatgatacttcactgtaatttaaattttatgtatcttaaattggaaaccttttcatatctttatgggctgtttgtgtttcctccttagggaaaagcatattaatgtcttttgcctatcaaaargttttgggaaacagttagtgacactttaatagaaaactaagcaaacaaaattaaaaagacaattattctggaaaaaagcaaaaagttgtacaagaagtacaattggtataccatgtggctcaactataaacagtgtttctataatgactaacaggaagtacttactaataatcactttgcaaagcttacagttgaagaaattgagacagattaatttgccaacagtcacatagcttgtaattattggaaatgaaatttagactaaaagaatctgacttcagagcccatgttcttatccatgaaactatgcttatttctctctgtatgtagccatagtatgaaaatggcatatagtttaatgaaaaggattttattttaatgaagttcaagtcctgtgtcttttttatcacttctgctttgggtgttgtatctaagaaattgttgcctaacctaagatcacagagttttactcgttttttacttctcagagttttatagttttagctcttgtatttaggtttatgatacactttgagttaattatgtatatggtgtgaggaaggggtctggatttgtacttttgcatgtggatatccagttgtcccaatatcatatcccccattgaatttatcttggcccctttgttgaaaatcagtttgttacaggaaaggggtcccaatccagacctgaagagagggttcttggatctcactcaagaaagaattcagggcgagtccacagtgcaaagtaaaagcaagtttactaagaaagtaaagtggtgaaagaacagctactccatagacagagtaggacgttcccgaaagtaagaggaggaacatatccactctaagtataatgcttgtatatatggggagatgtgttctgctacaagggtttgtgataaaggattaatttcttaattaactatttttgcaagaatggatattataaactttaaagcaaaattaggaatgcctttgttctccagatatcaggatagctggaagctcccaagtgtgggtctgtttagtaaacattattaatttgttcccttaaccataaacacctagaggctaggaatgcctaactttctgagaatgcagcccggcaagtcccagcctcattttcctagccctcagtcaaaatggagtggcctggttcaaatgcctctgacaaattgactataaatactagtttatttctggacttttgattgtatttaggtgatctctatgtctgttcttatacctgtaccacagtcttgattggtgtagtatcccattcgcttttactagaaagtttataaggattaagtaaggattattagcctcaaagctatttaataatagtaataaatatttattgagaaacccagctaagtgctttatgcacattaattcacttcagactgtcaacagatattagtcattgatgtgtatcaggctctgggctgggaatacatcagtgaactaatggagaaccttcttgctctaatggatctcacattagtggtgaattaattggggtgactggaggataataacaaatatgggaataagataattttagaaaatgattagttttatgataaatagaactgactaatttgagagtaaccaagagatgaaagggcatctttgatcctcataataacgcctataaaattggtactataatcccctaacatgaagaaactcaggcttacagaactgaagtgactgcccaaagtcccatagtttaataaaggcagaactgggttgtgaaaataaacctttagttggtagcaaatggaaaatgaattcaggttcaggaactgataagaatgcagtatctcctaattccttttctctttctgctggaaataggttgttaaggtcaaattataggctaagggttcttaatttgggattcgtagataggtttcttgaaaccagtggaattatagcaaaatacatgtgcatgcatgaaccctctggattgagggttcatagctttcatcaaattctgaacatggtctgtgataatagcaaaagatccataaacacatttgattcatgtgactcaggcagataccatattttctttgtgtctttcacagcaccactttgtctcctctctgtcaaacttcttcctttggcaataggaggggggaggaaattatttatttattttgttaggtttgaaataaattgtattctaacgtaaaaaaattatacagttacctaccagagtagatttttatttataaactgtaggacttaattattaatttctctgttcaaaactttaaaattgactttgattctgctgtcaatcatctttcatatcttgaacattcccaagatttgttcattgcctttgaaaggtcattctatgttttcttgcttttaattccattgccagttaagtctcccatttttttctcttttttctttgtcaaccctattaactgatcccatccttttctagccaggttattgcaacatattttttcccagaatcaagtccatcttgtgcctgtaaccagattgatctttctgaaatacttttatctttacattttatcgactcttcattttcttttcttgtttgtttgatttttggagacagggtttcgccttgtcccccaggctggaatgcagtggtgtgttcacaactcactgcatccttgatctcctggtctcaaatgatcctcctgcctcagcctcctgagtagctagagccacaggtgcactacctaatttttttttgtttttagtagagacgaggtcttgttgtgttgcccaggctggcctcgttctcctgagctcaagcaatcctcccccccttgacctccaaagtgctgggattgcaggcatcagccaccacgtccagcctggctcttcattttctcccatccaagtactaaccaggcctgaccctgcttagcttccgagatcagatgagatcgggtgcattcagggtgttacggccatagactggctcttcattttctaggatatcatccatgactgttgggccactccaaaaaatcacacacatacaaataaccggaaaaagaacatatattccccattttattaagctaacattctttctccactatctaattgtgtcagcttcttttagcttttcaaaaatactgtactattcccacctcattccagttagctattttgttgttgtttgttttcagtgttccctatgacaggcagcaggctgggtccttatctgcctgaaatgtcttatccctctctccatccctatttctatcagcgcaaattctttctgtccttcaatgcctagcttaagtgtgtctgtgtgtgtttttttaagcctgtctttcttctccaagctggaagtaatctttctttcctcctttgaacattcactgcacttcagctgtacttcttagggtatttaactctttgtacattttgttagatatttatgtacttaatactaacttcttgacagcagatgcattgtctctctagttttataattgtcccagcatcccccattatcctatgtcagttccagccttatacacktaataggttcttagtaaatattttttgaatgaattaatccttttttttgggagagacagggtctcacggttttgtccaggttagagtacagtggctattcacgagtgtgataatagtgcactacagccttgaactccagggctcaagtgatcatcctgtctcagtctcccaagtagctgggactacaggggtacaccaccacaaccaacaataaattcttccttttaaaatgtaactatattagtctgttttacgctactgataaagacatatccaagactgggtaatttataaagaaaaagaggtttaatggattcacagttccacatggctggggaggcatcacaatcatggtggaaggaaataggcatgtcttacatggtggcagacaagagagaattgagacccaagtgaaaggggtttccccttataaagccatcagatctcctgagactcattcactaccatgagaacagtataggggaaactgcccccatgattcaattatctccaaccaggtccccccacaacacatggaattatgggagctacaattcaagatgagatttgggtaaggacatagccaaaccatatcagtaacttaaacttgttatgcttttgaaagttctttcactactttaaaattctttcattacgaccccttgagggggggaagttagtaattaatctaaaaattataattaaaaaaggcctacacaaactataatgactataaagtatctaggcataaaataagaaactaaagctattttttaaaatcaatctaaactatatccctaaaattcacaatattctgttctgactaaaatacaaaaataatgtaagattcttgccacttatgtaatgtctaataatactagttacaaaattaattgaagtcttctagtttataaacagtcatgtgttttgtgtgtgtgtgtgtgtgtgtgtgtgtgtgtgtgtgtgtggacgaagtctcgctctgtcacccaggctggagggcagtggcacgattttgactcactgcaacctccgccttctgggttcaagcgattctcctgcttcagccttcccgagtagctgggactacaggtgcgtgccaccatgcctggctaatttttgtatttttagtagagacagggttttgcagtgttgagcaggctggtctcgaactcctgacctcagctgatctgcccacctcggtctcccaaagtgctgggattataggcatgagccaccgtgcctggcccaattatgtgtttaaaagaaggtgttaggggtgtgctagaaaatctctgtgggagtaggagcaacctttggagatggagaattattgattccttaaataaatgggaattactcatttggtggaaataagttgggtagtccctggaacctgtttttttgtttatttttatttttattattgttttttgagagatgagacctcacttgttgcccaggctggattagaactcctgggctcaatttatcttcccacctcagtctctcccgagtggcaggaactacaggccttttttttcttttttctttttttttgagatggagtctcgctctgtaacccaagctggagtacagtggcgctatctcggctcactgcaagctccgcctcccgggttcatgccattctcctgcctcagcctcctgagtagctgggattacaggcgcccgccaccacacccggctaattttttgtatttttagtagagacggggtttcaccgtgttagccaggatggtctcgatctcctgacctcgtgatctgcccgcctcggcctcccaaagtgctgggattacaggcgtgagccaccgcgcccggctacaggccttttttgttttttgttttttttaaatgaaggaaattagaagtggagggtgttctcctgtgaataatttctacttataggaagtaagttttaactggtacctggctaacttgtaaaggttctttggcattggcagaatcagctatatttagactacaaaaagaaaacctctaataatgtgcacttaagccttattacttttcagaagcataaatgacagcatgagaagataaaaggatgaaaggagtgatacagcattggggtaaagagcagaggctttggagagtggcagaactggatttgaattttgtcactaccatttagtagttgtgtggccttggcaagttacttttatgtctaaatctgttttttcatctgttaaatgggcataaaaagttttgtgagggttaaatggaatcacgtctgtgaagtatttggcacagtgactcgtttgtgcatagtgaatattatgtactattactatgatgatatcctaggtccagatatcaaaattcatccatggatcgttagaatccattataacatgtttggcatgccatgttatcgttataatcaaattagtgtaggataggtagatttgtgagtaacttgtgagtaagtagaattctaagttctgcttttagttttcccataggatttcaagtgcaaccagaaaagcaaaaaaagcaggtcgaggctgaagttgctgtttacttcacaatgtcatttttatttcagaagataggattatccatctactgagcaattatcaaatgctagatgtattagattctttaaaggtaattttattcagtctctgcaatccaaggcagaataatttgaccaagttcataatgtgtcaggaacttgtagagaaatggtaggacttataaggaatttgaactcctctgtcattccaaatcatgtactctatctttatatttatagtgcctctctcaacatggggaactttaaaaatcctcagggctcaggccataacacagaccacttaaatatgtttctagaggtgagacccaagcatgagtataaagttctccaggtgatttcattgttagattcagaaatactgacctggttcaatgcctagaacagagtagacattcaataaatgtttcacttttgaaagaatatatcccttcctacccagccgctgtgttgtaatttttccagtattatagtcaactaggagtgcttttatattaagtttttagaaagagctttgtatcatactttgtagatattctccatagcatatacaggaagatgtctggcaagaggtaatgttttgctgctgatagaattctgaatttcctccattactaggaagaagaataggttggaaattgggacagcttggaatttctttcttgtattccatccaaggttgaagacgtaaattgtgaatagacacttactgatttattttgttttagaataattttatattttttaataatacatgatcaaaaatcaaaagatagtaaggaacagagattgaaaatttttcctctcatttcccaatcatactttcctttccaagataccataaatgttgtatcagtatccttccagagatgttgaaaacatacataaacacttacatrtatttcacaattttacccaagtgatagcaygcatatcgtgttcatcttggagttatatatatgaatcttggaattatatattcatatataaagatttttattaatatatttgttcatttttacagttaactagtatttttctatatactacaatttattttcatcggtcccctattgatggatattagattttttccaacttttctctattacaaacgatgtttcattgaatacttaagtcatttcacttctgtgtgagcaattcttcagataaattcctgtaagttgaaggtattgatattgccagtttgccttccatggaggttgtatattgattgtttgggaatgacaaggaagcatgaaagagtatggagaattaaatgtgtaaaggagtgatagtgaccaagactattgactgttgactgaggtaggaatgatattaaagtcagttgggaggatggaaatgagcctacagccaagagcaaggtgaaaaactagcaggttttgtgtgtatatgaacacagaatttatttgtgattaaaatatactaatgaattttgaaaaatcctaaaatttttactcttaaatctatgtttggatttaaatacattttaaaatacttatttaaatgcatttacattattatgtaatacaatacattaaatacatttttaatatgatactttgtgatgaactctttatatctttaagagaaaatacctttgctgttttcattactgacttacatttagcatttattgascaagattttatctctttatgcataatttttctgaaatgtctctctcttttttttcctcagccctggaagaaagcgggacttttcccctgttccttggagtcagtattttgagtccatggaagatgtagaagtagagaatgaaactggcaaggatatatccttkgcaaaatggcttattctttagtgagcttatgatgttgtctaagttaaaagacttgtgtagtttctaaaatgttctttattcctgctacttatttcaccttattcctcacttgttctttatggaatattgcctggaagtccatgccaatatctttcttggctgtaattctctaatgcatggagaagggattaagaattaaattcttgaaactgatatactgtcttaggggcccaggggaaggtttcatgagtcaagtgagttgaactagtttcatttctagaatccaggggttatgtcctcatgagggcmaagggaakttttttttttttttcattgaacaaaatggtcacacaggcttcatgcttcaaacagagggttagtgtctcaraaaagtctgcttacatctcttacatttggcagtctgcagttttgcatgtaagtttctagcggtattactatgattaaataatgaaaaactttagtgagcaaaaacayagatgttttatctttaaytattcatacacttttcgagtctacaagagtggttcagagggtccagtcctgctccttctgcatggaggaggtcattctgccctttcttgggcygtgttcacggtaagtaggttgttgatagtacaagttaatgttagcacttttgaactaatgaaagtatagggacaaatcttggaagttaacacattctatttgggaagcaggaattgctattccaggcatacacacagactgggtggtatgttcttcagtatgtctgaagaacaaagagaaggttggaggttttataaaaaggagaaatgttatgtattgttctttgagaaagttaattggcactagtaaaggtttggggagaaaaagaaaagataatagggagtgatggaaaatgtgaaagaaaaatttaaaaatgttaaaaaagggtttggaagctggcaagttctgattgataagtaactgcggtgagtaaaactagtcttagagtcacagcagcttgtttcagtagctattagataaaactggtttcatattttagcagggagtttcagcagccaggcttgcagagaattacttacattcttgcagcaatgttatgtgccctgagtgctttttctctctggcctctcaactctgttttaatgggatatgacaagaataacccaatttgtgtaaacttccatagtgcaattattgtttacttctttgactagcctaactcttcattttgtgtagagaaccagacattttatttaggtgctttagataatgtctatcactttgtctcccatatagagcctatgtaatactttgcacatggagatatctcataagaacttggaaaatgtttcttcctttttgaaatgattctttatattttaatggtgcttgttagctacaaggaagtaaataatatttggctaatgatactgtggtctagagtagaagatatgtgtctgtgtgaatgctgtcaattatagatcttcctaatacctttgactctggggtgggacagcccatgtgcaaggagagatactgctaaggaagatactagcaacatctgtgtttaaaatgaagttgtcatctcatgtgtgtgtcaagcagatatgcatcctctatttaccactagagagcctgaaggacagaaaatgagagcaagtgggaatgcagcactaggtacctggagccagatggctgtggagttgaggaagtccctgaacatagcactttgttcctggcagcggggattattggggttaagtttaaatctcatcttgtctcttcttttagatcatgaattccttgaaaatarggataatgtgttacacttttttgtttcccaaatggcttgaaatagttctttaaacataggcacatattcaaccactattaaatgatttggcccttgtcttgtttgctacttttttctcttactctaggataaattgtgtgacttgtccataagtaccaggctctgtcatgtctctggaccagtactgtccaatagaaatagagtgcaaaccacgtatgtcattttaaatttcttagtagacactttaaatagataaaaagaaacaataaattaattttaatgtatatgtatttaactattgtatccacaatatcacttcaacatgttgaagtaattatattgattacctaatcaatataaaaattattattgagatatttacatctatttttatactgkaaatttaaaaattttatacttacagcacatctccgtttgggctagccacatttcaaatcgtagctttagtcatttacttcgcaaatagattgcaaarttttttggaggcaaattccatggcttattatgcctagcacatattgtatgcttgaagaattttatgtatgtatttattttttaagagatggaatcttgctatgttgcccaggctggacatgaactcctaggcttatgagtaattttcttccatctttctattttctaggttttcagttaaatgtttattactttcataatttaaagactgtttttttcttttactggaaactattttcaaggaaaaaggtcatattcacttctggatctgacaagtttggcaaactgaaacttgtctagagaagagcaatcaagattagaatactttaaacaatagcatttaaggaacaattaaaggaactgaaaggggtttgcctgaagaaaagaaagacttgggagacataatatttgttttcagttgtattttatttatgtatttttaagacaggatctcagtctatcacccagattagtgtacagtggcacaatcatagctcactacaacctcaactcctgggctcaagtgatcctcccacctcagcctcccaagtagctaggactacaggtgtgcaccaccactcccagctaatttttaatttttttgtagagacagggtctcactgtgttccccagggtggtgtcaaactcctggcctcaagcagtcttcctccctcagccttgcaaagtgctgagaatacaggcgtgagccaccaagcctgcccttcaataagaaaaaaaccagccacatcttttaaacatttactctgtgccaggtactatgctaagtgcttaagtggattatcccatttaatttttctgtaatactatgagattagccagataaggactgaaatttagagaagttagagagccaatgacagcatgaaaactcatacttgttctgactccagtgtgcatatttctttgaagactgcttttatgccacctaagaggaaagattcagggcagaaactagagacctattttgacacacataggcagaaattctaaagattaggactattacaaagcaacccaggtcctctgcagaggaaaagcaagcatcatttcactgaaaggatttaattgtgaatgtattcttccaagttccttcttgtccataattctataaaatccttgatcctgagtagaactccttttccatctaaatgttttgtggtttgggagggaaaatcccccaaatccagattcaccagaagttctattatgtatgaagagaaaccatttataccttggctttagtaacaaaaacaaacaaacaaacaaccataaagcacttgggaaacttttatctgtaaccacttttgtggaactatcaaagggatataactattagaagaaaattatgttgttttaaaggatagtctttaaatatctagaaaattaatttttgaaccttttattccttgtttatattcaataagttagtgattgtagttgctgctacagtagtcaagtttatcatatataatgggtaataatgtatggcttctgtagccttctcccatcagcaagtactaggtataacagaccacctagctgctgtgggagaatccagaatgaagcagaaactgaagtttggctgagccagaagagagatgagaggaacagtgggatctcattagcacatgcagctgcagcaggctagattttgccagcctccaatggttttcagctttggtacctctgaagaatctgggaccagataagtgtgtgttgattgaagccaagaattgaacctgagtgtctgctgattcccatttcttcttctagttaattcagttgatttcagcaaatatttactgagtatattctatatcccaagctttgtgctgagtcactaagattcaaaaaattaaacttcagggtccggcatggtggctcatgcctgtaatcccagcactttgggaggccgaagcgggcagatcacraggtcaggagatcgagacaatcctggccaacatggtgaaaccccgtctttactaaaaatacaaaaattagctgggcatggtggcacacaccagtagtcccagctactagggaagctgaggcaggagaaacgcttgaacacggggggcagargttgcagtgagtcgagatcgtgccactgcactccatgctggcgacagagtgagactctgtctcaagaaaaaaaaaaaaaaagagactttactcttwaataagatcagccaatcagcaaatacttactaamcccctgctgtgtaccaggcatcgtacaggtgctgtggatacagtggagaattaaacatatgttccatcttcctgttcttacgatgtttaaatctaatagggaaggtaagaaaaatggaaatggcacatgtatacaaaaaatacagcaaacattttaagaaatttttatctcagactaggttttgaatgtcaaagcagcttaatttatctgaattttagatagatgggtataatacctcctagttaatagagtggttgtgaaaattcaacaaaagatgtaaggttcttggtaaagtacttgactcataagcactcagttgttaaatgagtttgcagcaagatacaaaggtaatgcagaggaaggaatgattaacttgtggtagatgaggggactacaaggaaagtttcataagagaggacatctgaaatggtttttaagaccaaatagaagttggattagtagggaaggcatgccaagaaaaggtaagcacaaaggcattgaagagtgtaacagtgaaatatgttttggaaattataagtagcttggctatagtttgaatagagttgaggttgtagttgtataatatatgatgagggtggagagcagggaaagaagtgactagagagatcactggagcaaaattatagaaggggcttgtatacctagctaggtaattgtacctttagtttccttttacttctgggtaacagtagagggggctatttttgtttgtttgcttttgtttttgatacagggtctcactctgtcacccaggctggagtacagtgatgcaatcctggctcactgcaaccttgacctcctgggctcaagtgatcttcccacttcagcctcctgagtagctgggaccacaggtgcgcgctgccacactagctatttttattttttatagagagggaatcccgctatattgcccaggttggtcttgaacacctggcctcaagcaatcctcctgcctcagcctctcaaagtgctgggtttacaggcatgagctactgtgtctggccatgggagctatttttaaacacaacatttaccccacgcacatccacattaagcatattttaggcatgtcaaaattagggagtatggaaagcatgttttgcttgacacacattcacactgtaaagttctggtgagttaagtatcttgatacacatttacctgattgtaattgagtaccactgtttcaggcaataggaagctattgaagagctttagaaaaatcaaaatactagtatagatgattgattgggcaggaaaccacagtggaggcagggagactagttagaaggctattcttatattactcaattctaaatatttgacatcttatggagtattaatttctctcaaaaaggaagaagttcatttacattttctaccatgtaaaaaactacttaggataatactgtttgaagctatttgatttatgaaggtattattagtctgataccaaaaccaggcaatgataatataggaaaactaagccagtgtctcttataaaatagatacagaagtggggcatagtggcacataacctatagtctcagttacttggggagctaaggtgggaggagtgcttgagcccaggagttcgaggttgtagtgagccaagatcgtgctactgcactccagcctgggtgacagagcaagaccccatctcatttatacatacatacgtaaatattcacttgctcattcacctaatcctaaggaaaataacagcagattgatagtgtggtaaaataataatacactgtgaccaggtaggttttgttcaaggaatgcaagaatgtctcagcattagaaaatattatcagtatgattcacctcttacctcacttgatgccccaaaaaggacttgataaactataatgtcccttcatgttgaaaactcttggccactaggaatagatgaaaaacttcctaaagattataaaattcatacagaaactagaaaattgcatgaatatcatacttagtggtaaaacagacacattgacacattccttttaaactcagggataagacaagtgctgtgttttggatatttggccactctaaatctcagttgaaatttgatccctaatgttggaggtgaggcctaatgggaagtgtttaggtcatgggagtggatccttcatgaatggcttggtgccgttctcatggtaatgagtgagttcttactctcctacttccaagagttatttaataagatctgacatctccctcccctctttctgcttccacttttatcacatgacctttgcacctgccagctacccttagccttccaccatgagtggaagcagcctgatgcactcagcagcaggaccagatgctggtgccgtacttcttatacagcttgcagaactgtgacccaaataaacttcttttccttataaattactcaggctccgatatttctttatagcagcataaatggactaagacagtaagggtgcaattttcagtgttatactggagtttctagtcaaacaatacaaaaaaacaagttttaaatatttgaaaaaagtagctagaacaattattatgtgaagatattctctctctacaaaatcaactgacaaactactagttaagcagtttacaaagttgatgtttaaaaatctgttttttctaaaattagcactttgcagatctggaaatgtaataggaaaaatcctattcataaaagcaacaaaatgtaaaatacgtgggaatagaccttattttttaaatgtaagacatttatgaagaaaacaataaaatgtcacagaaggatttaaaggaaaatctgaatatggaaataagttatgttcctgtatgaatctagctaaactggctaagatcccagtgggattttttcatgagagttaattaaacaaactgaaattcacacagaataataaatgcctaggaataaccaagataattttgaaaaagagcaaaaaaaaagagcaatctggtctttcagataccaaaacataatctaaaagtctatcagttaatagtatggtattggtagaaagaataaagaaataagcccatgtataaaaaggaatttaatacacaatgaaaataacaatgcaaatggattaaacaacacaaatgaatttaaataacaaatcgtaagaaaattcagatacgaccttaaagcaggccttcttaaacttagccaaaagaagtgaaagccataaataaaagattaatttgagtttaccaaaacaaaaacttctagacaaaataccgtaaagttaaaacacaagctatgtgctagataaaaaatatttcatatatgtgcaaaacaaactataggcaaagggttaatattttcgttatattaaaaagaagaaaaaactacaaagcggtaagaagaaagacaatccagaagaaaaatgggcaagagataagaagtgttagttgacagaagaagaaatatagataatggataaatttataaaaatgggactaccttactattaattagcaaaatataaagtgaaataaaagaataacacttttgagaggggcggcagagcaagatggtgaaatagaagcctccacttgtcgtcctccccacaggaacaccaaattgaacaaatgtccacacaaaaaagaaccttcataagaaccaaaaatcaggtgaatgatcacagtacctagatttatcttcatatcacttaaagagacactgaagaggatagaaacgacagtcttgaattactgacatcaccccttccccatctgctggcagtggttgcgtggaacggagagagaatctgtgtgcttgtgggagggagagcacagtgattgtgtgactttgcattggaactcagtgctgccctgtcacagtggaaagcaacactgggcaggactcagtaagtttccacagagggaggatttagaccagccttagccagaggtgaattacccattccagtgttctgaatttgagttctggaaagccttgcyacccaagctaaagggtcctggggtcctaaataaacttgaaaagcagactaggccacaaggactgcaattcttgggcaagtcctggtgctgtgctggtgttggagccagtggacttgagcagcacataaccttgtgagacaccaggggcagccaggggagtgcttacgccacctctcccccaacctcaggtggagcagcttgcagctctgggagagactccttctttctgcttgaagagaggagaggaaagagtaaagaggactttatcttgcaacttggataccagctcagctatagtaggataaggcaccaggcagagtaccaaggcccattccaggccctaattcccagacagcatgacacatactgagctagaagggagcctgcttccctgaagggaaggacccagtcctggcaggattcatcccctgctgactaaagagcctttgggtcctgaataatcagcaacagtattcagacagtatttgccgtggtcctgaggtaagactcagagatgtgctggcttcaagtgtgacccaacacattcccagctgtggtggctatgaggaaggactctttctgattgagaaaaggagagggaagagtaaagacttcatgttgcagttaggtgccagtggggtagagcaccaggtggactcttggggttcccaattccaggccttggctcttggacagcatttctggacctaccctgggccagaggggaccactgccctgaagaggcagtcccaggcctgacagcattcaccataagctgactgaagagcccttaggccatgaataaacactggtggtagccaggcagtacttgccatgggcctggggtagttgtagccatggggagagactatgcttgtggaaaggatagggaagagtaggaaggactttgtcttgtgacttggatgccagctcagctgcagtatagtagagcaccaggtagattcctaaggtttccaattccaagccctggctcctggatggcatctctggactcacctgggaccaggggcaacccactgccctgaagggaaggacagaagcctggctggctttgctacctgctgattatggagccctagggccttgagtgaacacagatagccaggcagtggttactgtaggccttgggtgagtcccagtgttgtgatggcttcaggtctgacccagcacagtcctagtgctggtggccacaggggtacttgtgtcactccacccccagctccaggaagctcagcacagagagagaccccatttatttgggagaaaataaaggaagagtgtaagaatctctgtctggtaatccagagaattcttctggatcttatccaacaccaccaaaatagtacctctgtgagtctgcaagagctaggtgcttggggtgccccctaatgcagctatggctgcagtgaccaaaaacttagatgacaatacccaagtttctttgaatacctggaaagctttcgcaggaagaatgggtacaaacaagcccagactacaaagactacaataaatacctaactcttcaatgcccagtcactgatcaatattcacaaactcaagactgtctaggaaaacatgacttcaccacatgaactaaataaggcaccagtgaccaatcccagagagacagagatatgtgacctttcagacagaattcaaaatagctgttttgaggaaattcaacaaaatttgagataacagagaaggaattcagaaaatttatctatagataaatttaacaaagcaattgaaataattaaaaagaacagaaattctggagttgaaaaatgcaattgacataataaagaatgcatcagagtctcttaacatatttgatgaggcagaagtaagaattagcttgaagacaggttatttgaatatacacaaaggagacaaaagaaaaagaatacaaaaacaatgcagcacacctacaatagaaaatagcctcaaaagggcaaatttaagagttagtggtcttaaagaggaggtagagagattggcatagaaaatttattgaaagagttaataacagaacttcccaaacctagagaaacatatcagtattcaaataaaagaaggttatagaacaccaagcagatttaacccaaataagactacctcaaggcatttaataatcaaactcccagaggtcaaagataaagaattctaaaagcagaaagagaaaagaaacaaataatatacaatggaactccagtacatctggaagcagacttctcagtgaaaaccttacaggccaggggagagtggcataacatatttaaaatgctgaagggaaaaaaaaaaaaacttttatgctaaaatagtatatccagtcaaaatatccttcaaacatgtaaaagaataaagactttcccagacacacaaaagctggaggatttcatcaacaccagacttacaagaaatgctaaaggtagttcttgcatctgaaagaaaaggacattaatgaacactaagaaatcatctgaaggtacaaaactcattgataagtacacagaaaaacacagaataacattgtaattgttgtgtgtaaacaactcatatcttgagtagaaagactaaaagaggaaccaatcaaaaatattaactatgacaacttttcaagacataaacagtacaataatatataaatagaaacaatagctataaataggttgggcatggtggctcacacctgtaatcccgcactttgggaggccgaggtggacagattgcttgagcccaggaatttgagaccagcctggacaacacggtgagaccacatctctacaacaaaaaattgactaagtgtagtggtgtgtgcctgtagacccagctacttgggaggctgatgtgggaggattgcttgagctgggaggcagtggttgtagtgagctgagatcacaccactgcactcaagcctaggcaacttgagaccctgtcttagaaaaaagaaaagaagtagagacaacaaaaattaaaaagtggagtgctgaagttaaaatgtagagtttttattggttttctctatgcttgtttgtttgtttatgaaatcagttttaaattgtcaccactttacaataatgggttatgatactatttgcaagcaaactcaaaccaaaaacataacaacagatacacaaaaaataaaaagcaagatatttaaacataccaccagagaaaatcacctgcactaaagaaagacaggaaagaagagaagaccacaaaacaaccagaaaacaaagttgcaggaataagtccttattaataataacattgaatgtaaatagactaaactcgccaatcaaaagacgtggagtggctgaatgaatacaaaaacaagacccactgacctgttgcctactagaaacactctttatctgtaaagacacatatagactgaaaataaagtgagggacaaagatattccatgctgatgcaaactaaaaagtgggagtagctatatgtatatcagacaaaatagatttcaagacaaaaactataaaaagaggcaaaagtcattatataatgataagggggtcaattcagcaagaggatataacagttatacatatatatgcacccaacactggagcacccaaataggtaaagcaaatattattagagctgaagagrgagagatgggccccayccaatacaataagagctggagacttcaataccccactttcagtgttggacagataatcgagatagaaaaatttacgtaatctgcactatatatcaaatggacttaataattacctacagaacacttcatccaacagctgcagaatacacattcttctcctcaagacatggatcattctcaaggatggaccatgttaggtcacaaaacaagtcttggataacattcaaaaaactgaaattatatcaagtatattttctgaccacaatgaaataaaactagtaatcaataagaggaggaattttggatactatacaaacacatagaaaataaacactatgctcctaaatgaccagtgggccaatgaaattaagatggaaattttaaaatttcttgcaacaaatgataatggaaacacaacataccaaagcctgtgagatacagtgaaagccatactaaaaggaaagtttatagctataagagcctacatcaagaatgtagaaaactctcaaataaccaacccaacgatgcatcctaaagaattagaagagcaagaacaaaccaaacgcaaaattagtaggagacaagaaaaataaagatcagagcagaaataaatgaaatcaaaacaaaaaagtagaaaagatcaacaaaataaaaagttggtttttgaaacatgaaattggcaaacctttagctagactaagaaaaaagaaagaagacccaaataaaatcagatgaaaaaggagacattgcacctgatactgcagaaattcaaaggattactagaggatactatgagcaactatatgccaataagttggaaaatctagaagaaatggataaatttctagacacgtacaacctacgaaggttgaaccatgaagaaatccaaaacctgaacagaccaataacaagtaatgaaatccaagctgtaataaaagtctcccagtaaagaaaaatgggacctgatggcttcactgctgaattttaccaaacatttaaaaaagaaataacaccagtcctactcaaactattctgaaaaatagaggaggagggaatactttcagactccttctacgaggctagttaccctaataccaaaaccagacagacaaaaacaaaaaaactacaggccaatatccctgatgaacattgatgcagaaatcatcagcaaaatactagcaaaccaaattcagcaacacattacaaagattattcaggctgggcacagtggctcgtgcctgtaatcccagcactttgagaggctgaggcgggtggatcacttgagatcaggagttcaagatcagcctggccaacatggtgaaaccccgtctcttctaaaaatacaaaaattagccagacatggtggcgcgcacttcttattccagctactcaagaggcagaggtgggaggattgcctgaacctgggaaatggaggttgcagtaagccaggatcatgccgctgccctctatcctgggtgacacagcaagactccgtctcaaaaaaaaaaaaaaaaaaaaaggaaaaagattattcattatgatcaagtgggatttattctaggatgtgaggatggttcagcatatgcaaatcaatcagtgtgatacatcatatcaacagaatgaaggacaaaaaccatatgatcatttcaattgatgctggaaaagcatttgataaaattcaacatcccttcatgataaaaaaaaaaaacttaaactgagtatagaaggaatgtaacacaataaaagccatatacaatagacccacagcttgtataatactaaaaggatgataaatgaaaagttgaaacctttcttgtaagatctggaaaatggcaaggatactcactttcatcactgttattcaacatattattggaagtcttagctagagcaatcagacaagagaaagaaagggcatccaaattggaaaggaaaaagtaaattatcctgttttgcagatgatatgaacttatatttagaaaatcctaaagactccaccaaaaaactgttagaactgatcaatttaataaagttacaggatacaaaattgatgtacaaaaattagcagcattcttatatgccaacagcaaacaatctgaaaaatcaagaaagtaaccctatttacagtagctacaaataaaatacctaggaattaaccaaagaagtgaaatacaatgaaatgtataaaacactgatgaaagaaattgaagaggacacgaaaaagagaaagatattccatgttcagggattggaagaatcaacattgttaaagtgtccgtagcacccaaaacaatctacagatgcaacacaatcctatcaaaaataccaatgatattcttcaaaaaaatggaacaattktgaaatttctatagaaccacagaagacccagaatagccaaagctatcctgatagaaaagaacaaaactggaggaataacattacctgacttcagattataccacagggttataacaaccagagcagcatggtactgctataaagacagacacatagaccaatggaacagaatagagaacccagaaacaaatccatacatctacagtgaactcattttcaacagaggtgctaagaacacatgttggggcaaggacagtttcttcaataaatcatgctgggaaaactggatatccatatacagaagaatgaaactaaacccctatctcttgccatatacaaaaatcaataaaaatgaattaaagactcaaactatgaaagtactaaaagaaaacattgagaaaactctccaggacattggactgtggaaagattttttttgagtaatacccaacaagcacaggtaaccaaagcaaaaatggacaaatgggatcatgtcaagttaaaaggcttctgcacagcaaaggaaacaacaaagtgaagaaacaacccacagaatgggagaaaatatttgcaaactatccatctgacaagggattaataaccagaatatataaggagctcaacaactctataggaaaaaatctaataatctaattttaaaatgggcaaaagatctgaatagatatttctcaaaggaatatattcatatggcagacacgcatatgaaaaggtgctcaacatcactgatcaccagagaaatggaaatgaaaactataatgaggtatcatctcaccccagttaaaatggcttttatgcaaaagacaggcaataacaaatgctggtgaggatgtggaggaaagggaaccttcatacactgttggtgagaatgtaaattagtaaagccactatggagaacagtttgttgattccttaaaaaaaaaaaaaaaactaaaaatagaactaccrtataatgcagcaatcccgctactatgtatatagccaaaggaaaggaaatcagtacatcgaagagatattacactcccatgtttattacagcactatttacaatagccaagatttggaagcaaccagtgtctatcagtagatgaatggataaggaaaatgtggtacatatacacaaaggagtactatttggttataaaaaagactgagatctctgtcatttgcaacaacatggatggaactggaggtcattacggtaagtgaaataagccaggcacagaaaaaattcacatgttctcacttacttatgggagctaaaaattaaaacaattgaactcatggagagtagaaggatggttaccagaggctgggaacagtagtggatggggagagggaggtgggaggtggaggataattggggatggttaatgagtacaaaaatatttaaatagaatgaataagatcttgtatttgatggcrcaacagggtgactacagtcaacaatagtttactgtgtattttaaaatagctaaaagggtatagttagattgttttcaacacgaagaaaggataaatgcttaaagtgatrgctacctcatttgcccgatgtgatggttatgcattgtttgcctgtatcagaatatctaatgtactccacaaatgtatacccttactatgtacccaccaaattttttaaaaaacaataccattttttacttatcaaattagccaaaattaagtttgaggatatcatatatttgtggggatacctatttctccacactttcaccaatacctgataaacctctaagaacctgttttgttygccaaaaaaactgtgctaatattttcccagccgacttcttaagaagataatatgagattatctgagataatctggtgaaattataaagtgatacagaagcatattattactacccagttcttccaatcttgtctctgttctctagtctcgggttaggatagtgggccttcattttgggtatacattagaatcacctggagaagtcgaaaatgtgtaaataacttgaatcagaatttctggtgggtttgcccctgggcagtagtatttaggtgattgattctgttatgtagccagggttgaaaaccacctggaaccaggcagcttggatttgaaaattggctctgtcacttattagctatttagccttgggcaagttacttaatctctctgtaaaatgcccttatctgtaaaatgctgaaaattatgtctaagtagtaaagagttgtgaggagaaagttaggtaattcatctgaagcacttagattgctgactggcacatagatttagtagacattagctcctactgctattgttgcagttattgctaaacaccataatattctagtgagaaaatggttggttaagtctagttcttaaatagctgctttccactcatccatttcagaagtagcaaagttgtactatttgtgacaagatctggagtagctaccatagatctgctctgactttttgattatctttaaagcatgtgttagtctgtgaatttactttgctcatttatttttttctagtcttcttccaccatagtagaatgtagatatcatgagagcaggagtattgccagtatttttccctcctgtaacccaattactccattggtgccagatttttattagaaagatttgttaaataaataaatgaaaattttgtttttaatatttgtagtgattttmtgacaggcacctatgattgtaaatcattgctttcaagttaaaggttggaatttcaaatatatattttgtttctgttttgtaaacctggttctattatctagagcaatcaagcaaattcatactatcttttccacttaattttatttctaacatagggatttgtttttgtcattgaaggctttactgtcactaaataactcctgtaaattagcaaatagctttcaggaacaaacagcaaagtatagtagaatttcattccattgttgcctttaaaaggtattcattagaataatagaaatagaatcagacttgattttctaggggattttaaaaatatgacttaagaatctgacttgttttgtgatttacgttgacttttatattggtaacttaccttgggtctagttctgtttttactcctaatttgttatgtgaccctgggcaaataattttctttctcttggcctcagttttctcattcataaaatgtgacggctagactagacagttctcttattttattcttaaaagttaaaatttggtgacatttgctagccctaattgtgatatattattgtcaaagaatccagtttagtttaggaagaagatccccaattatttcagatttttttcaccctctaaaattgtacctcccccatgatattatgatttttttcaataaatttttaataggtacacaagctggtatgttctgcagtatctgtcttaagtgaatctttagtagattccatgacttctgctactttcagcaaatttcatgatttgattgtcatgtttctgtgatgtcctgagccaagatataaactgactcaccgtccttatctaagggattctctctccagagtaaggaaaagatatccaaggaatatagatgaaaaccagagctcagagggtcattgtctaaaggctcttaactgtgtgtgtcaagaaaggataggaagaattaagattgaaagagggatttaggtagagaaagccatattttgaagttgggacagaaccacaatatatggcaaaactagtagaaaatcatcattctttcattttgcttaaaactagaaagtcttttgattctcttgggtcctttgaattttgatggcagttcattttacaaagttatcattgggaattgggtgaaatttgttatcctagatgtgtcttaactacttttcctttttctcctaggcagcgattattagtagagttcagtgtaggattgtagctttggatctgcgaagtcatggtgagtaaagttcttaattagccattaactggattatagtcatcaagcccctttgaatagttgtaactattagaaatttcaacgtggccataaaataacctggtctattccatttgagctttttgttgttgtcgttggagatggagtctcattctgtcgcccaggctggggtgcagtggcacaatctcagctcactgcaacctctgcctcctgggttcaagcaattatcctgcctcagtctccccagtagctgggattacaggtatgcgccaccatgcccagctaatttttgtatttttagtagagaccgggtttcaccatgttggccaggctgatatcaaactcttgacctcaagtgatccatccacctcagcctcccagagtgctagcatcacaggtgtgagccactgcgcccagctcgatttgggcattttgaaggaagtcctagcttctagtctttacaaatgtatgtgtgtgtatatatattaaagttttatgtataatatttatttttgtattttatgtgtgttaagctaagaaaatgtcctttaaagtcaaattctttttttttttaatttttttttattatacttttaagttttagggtacatgtgcacattgtgcaggttagttacatatgtatacatgtgccatgctggtgcgctgcacccaccaactcgtcatctagcattaggtatatctcccaatgctatccctccccccttcccccaccccaccacagtccccagagtgtgatattccccttcctgtgtccatgtgatctcattgttcagttcccacctatgagtgagaatatgcggtgtttggttttttgtgcttgcgatagtttactgagaatgatgatttccaatttcatccatgtccctacaaaggacatgaactcatcattttttatggctgcatagtattccatggtgtatatgtgccacattttcttaatccagtctatcattcttggacatttgggttggttccaagtctttgctattgtgaataatgccgcaataaacatacgtgtgcctgtgtctttatagcagcaagatttatagtcctttgggtatatacccagtagtgggatggctgggtcaaatggtatttctagttctagatccctgaggaatcgccacactgacttccgcaatggttgaactagtttacagtcccaccaacagtgtaaaagtgttcctatttctccacatcctctccagcacctgttgtttcctgactttttaatgattgccattctaactggtgtgagatggtatctcattgtggttttgatttgcatttctctgatggccagtgatgatgagcattttttcatgtgttttttggctgcataaatgtcttcttttgagaagtgtctgttcatgtccttcgcccactttttgatggggttgtttgtttttttcttgtaaatttgtttgagttcattgtagattctggatattagccctttgtcagatgagtaagttgcgaaaattttctcccattttgtaggttgcctgttcactctgatggtagtttcttttgctgtgcagaagctctttagtttaattagatcccatttgtcaattttgtcttttgttgccattgcttttggtgttttagacattaagtccttgtccatgcctatgtcctgaatggtgatgcctaggttttcttctagggtttttatggttttaggtctaacatttaagtctttaatccatcttgaattgatttttgtataaggtgtaaggaagggatccagtgtcagctttctacatatggctagccagttttcccagcaccatttattaaatagggaatcctttccccattgcttgtttttctcaggtttgtcaaagatcagatagttgtagatatgtggcgatatttctgagggctctgttctgttccattgatctatatctctgttttggtaccagtaccatgctgttttggttactgtagccttgtagtatagtttgaagtcaggtagtgtgatgcctccagctttgttcttttggcttaggattgacttggcgatgcgggctcttttttggttccatatgaactttaaagtagttttttccaattctgtgaagaaagtcattggtagcttgatggggatggcattgaatctgtaaattaccttgggcagtatggccattttcacgatattgattcttcctacccatgggcatggaatgttcttccatttgtttgtatcctcttttatttccttgagcagtggtttgtagttctccttgaagaggtccttcacatcccttgtaagttggattcctaggtattttattctctttgaagcaattgtgaatgggagttcactcatgatttggttctctgtttgtctgttattggtgtataagaatgcttgtgatttttgtacattgattttgtatcctgagactttgctgaagttgcttatcagcttaaggagattttgggctgagacaatggggttttctagatatacaatcatgtcgtctgcaaacagggacaatttgacttcctcttttcctaattgaataccctttatttccttctcctgcctaattgccctggccagaacttcaaattcttatgctgatgtataaggaatgtggataaatctttgctaggctactgtaattatccttcttaggataactataaagatttttctgaagaaaatccttgctaaactcattgtgtaaaattgtgaagtccctaatccattgtccamagatgatatttttaaaagagaatacttctgcttttataattcctgtctgtgggaattttatttttaaaatattttcattttaggtgaaacaaaggtcaagaatcctgaagatctgtctgcagaaacaatggcaaagtaagtaaccaaatatttcttatacattgcctgtctcccatcactattataaatagtactrtaactttatcactttcctgatgagattgttggggaataattaccacaaggaaaattttacttctgttctctctcctctacttctggtttctccttactatttaatcttgaargaaacctgcgtctttcttggtgtgtccaatgcaatggtcatcatataaagcacatgaaaattcttcaaggcacagtttagtttgtgaaggcttttgaaaagttttcttctgttgatggaattgcgttgaatctgggtacttatcatggactcacgcttggaaaagtagttgtatgcaagaggccttgagagtatctccttcaggtatcctgcgtacattcttcgtcttatgtcatagaaagatgagatcatgatattaaaaaatgacagttacaccctgggcctaaagtaaaaaatgaatgtaacatgtacagtggctcttaaaactgctcactcatcagaatcacttgagaagttactagacatacagatgacttgaccctaccccagacctacttctagcagtggagtctgggcatttatattttggtaaagctctgtgtaggaatctgatggagccagttcaatgactgttgtttgggaatcactgacctatagcataaataggattcttctagccactctgctttaatacgtactctctcaggtatttggtcactttggccaaaaatatcttgccctcttttactttagcagctttaatttaagaataaacattttccttcagagcccaaactgatgtaggcaacaattttaatattattattttttcactgtctacctggagataattgttttattattatggtaggtgttatttgtgtactttttatctgccaactttcattaaagtataaactaagcatttattaataataaatcattaacttattttgtgtaatcatttattgaaattaatcctcattattaactctgtaatacagatatacccttttacagatgaggaaactggctcatataggttgaataactgtatgaagtcacacagtcagtagattgaatttatgatcattcaactatagtccttggcagagagagagagaaagaaataatgtgtatagtatgaatgtcattccactcaatgaacatatgccttaaaaagtatgaaaagagaggtaagaatctgttcctccaattattcctactgccttcattaatatgagagcaatatatcctcaaacagtcaaggctgttagtgatacctataggaagatttgtgaatgatttttaaggaagtaaagggtttcttaacttttaacaaaaaagtgaaatacatcatctgagtgtccaggcagtcagacaaattgatgatgatagcttggttgacattctagaggaaattgaagaattgattgagaaccttaaggaaacatggactaaataataatgtttcagtctggggctcatcaggaaagagaaaccatgtagtaatttgaataagtaaagttgaatataaagaattattcactataacaggggattggaatgagcgattggtagtaagaagtaacaaaaactcttaataatataggaatagcagatataaggagcagccactactcccttgggctgagggagtacacccagggttgagatccagaccttgttggagaatgcacgaccatggtttactgaaggttagaacttgctgaaaatctgcccttttggaacctgacagaattctgccctctagggtatagggaaagctattcgtggggaggatctcaccagaggcacttggctacaaaaacactgggttggggagggctagagtactggagaagccacttgtgctggaggaattgtgcaggaattggcaggagttggatactgggggaagttctgtgtttctctagcaccctccattaacatagcttaatatcatgcctactggcaagggtaaaatatttacaggcctcacatctatttttgtagagtaggcaatgaaggatgaattggagttgaggtagtaagttgataactggcaccaaaaaaattttttaatggtaaaaatcatccacagtagatgatgaccaagaatcaaaagggcgaacaaattggattcttgctgaaattatccaagcagtaaaacatttgtgtgatttctgaattcagttactgtggaaaaaaaaaaacctcaaaatgggcatacttattatcaactgcagaacytaaatactacytaagaaagtatgtgaaaaagccagaatttgagcttgggtcattctgatattccaatttctgtgatacacagtaatgcttctcagaaaattaacctagcattaaaatatgacagaatccctttaaaaagcatccaccaaaattgtaatacatccagttacagtctagatttgtaggtaacccttgctacttcatctttattgtatttctctggattttcaggacttatctcaagtaaggtacttgttgactgaawgctctgcttgattttaataacaataaatttctcttggtggtagatgatcaagtgattgatcgtaactaccttctacctgggtaaatatgcctttcttaagctcagacacgatgttcagttggtgtgtttcagacctctctacctttgtgcatgaggcagatactgcagaaccccttcaattcagttaatgtgtattttaaggtgacttggacttagataatcgtccatagcatccttttattttactcattatttgtctgttaccaaccgaaagtttcttggaattgttcaagaattattctggaaattacatgttgatatttaatataaacatgttttaaactttagtcttttctttaaaaaaaaaaaaacagtttgcccccaaaattgtatccaatattgttttagattaattaattgakcatataattttttctggtctgttattttaatatgcagaattagctttggaatactacctgttttattttttagaaactgtatgtgtaataatttcctctgtgttactactctaaagaccacatattatcgaatctttgttcctgatattttccagtggcctctgagcaaaggcatcatggttttgacttcatgaaattactctgaattcacactaccctatgccaaggggagatggctttaccatttatgcctgaggttgcaattttttgaatttttgcaatcagaacttggtgatgaccttgggcagtaggatataaataactcccacatgcttagtgttccagtagtggaacactagcataaattggttaactcgttgaaacattgaaaatatgtttcagtgaggtaacaagaatctgcagctctttttacttggtagaaatgcaataatatttttatagacccagtgagaaaatgcaataatatttttatagacccagtgagattaattgattaatacagaaccttctagacagggctgctgaaggattacgttaggtgatgttataagaaagtttagagcacaactgaaaaagaagcactgaataagtattagttctcttttctttccttcatatcattttgtctcccagagagaattttgtgttactatagaagcagcactggtgtcaaagaagcttggacttttcgtcttaactatttgttatcgctttggatgactgcctgaactgcttcactttctgtcttaatcttaaatttaagtcgaacgaatattaaactatttgttttcacttacaaagtttggtggcctccctatctcccattcagattgtctacaattgccgaggctaccctattcactcctgcagttgttgtatgagattttaaaaatcagttcctacagaactaataacatttgcctttgccattataaatactgtagagactatatatgaaagtctgtgttcctaccttgacacttgctatatttggttaacactgtgtgagtgcttaaggtatgcagtgacactcaacaagacaaaactttcttttgaagttgaaccagccactcccaaaagaagggggtagaactagcctaaaaatatatatatataataaggcagtagagccagtgggtctccagaaacacaccttactgttcttatccacctattgctatagcaaggaaggcctacatgcaattaaaaaccaaacttcatacttcagttctaattttcaaagctttaaaattagactttgttaaataggtccattaataattgaagattagaaccaaagccaataaaatgagctctgaacacctttctagtttctcagagcactgtacttacatttatgttcatccttcaaacaaatgagaaattgtaaataataattaacatttgtgaagcattttactctttcgaggtgttttcttgttcccttctcagttaatcctcaaagcaatccagagcagtcagtgatatttttatctttttttatagatgtcgaaactcagtttctgagagattaagtaactaacccaagatcacatagtgaaaaataaactgaggctagggctcatcttgtgattctgaggtttactacattataatgcttaataaatttttgttcttgttttatagatgggaaaattgaaacagagcagttaaatgatttttccagtttcaatcttaggttcaaaataaaggtatatgtttatgtaattgtactacatatgtggaacagtgaaagtgtgatgtaaaggaaaattcagtaatttgggttcttagtcctttacctgccatttatcaggagagctaggtgtgtggctacacatattgatgctggggacatgttagaaggtttacataggtatgtttgtaagatggcccaatagacttttacagtttcccagcactgttacacaccaaagaaaggaactgggaaagaaaaccatttttacagtgttgtcagaaagcattcttagatctttttctcttctctttgcagagacgttggcaatgtggttgaagccatgtatggggaccttcctcctccaattatgctgattggacatagcatgggtggtgctattgcagtccacacagcatcatccaacctggtaccaagcctcttgggtctgtgcatgattgatgttgtagaaggtgagttttcttagcactgaccaaatcaggatttcacttataagagacatccttggtagattattaccttgtcttagtttattgttgatttcattcatcttgaaatatgtccctctgtctttatatcttttttaagtttatacaagataaccatttttccatgtcatcaaaaactcttcattaacatctttttatggctgcataatatttcaatcctatgtatgtcccataattgtatttaatcatataaaaagaagctgccatgtcttttctgacccagcttcagaagtcacactgctgcttgtgaatacaagtcatcctcttcagtgtgagggcatgacataaagaagtgaataccccagaggcaaaaattattgagggccatctttatttctctgcgagcatcactaaattctgctgtcatcaagagcagatatatagtagttgactcagtaagtgtaaatgctcagaataagttaaatatgtggttacagtttttgtttaacatccaggtacagctatggatgcacttaatagcatgcagaatttcttacggggtcgtcctaaaaccttcaagtctctggagaatgctattgaatggaggtaaccaacaaatctttgtcgcctttatttaattaatttgtttgtttgtttgcttgcttatttatttatttaggagacaaggcctcactctgtcacccaggctggagtgcagtggcatgatcctagctcactgcaaccttgaactcctaggttcaagcaatcctcccacctcagcctcccaagttgctaagactacaggtacacaccaccaagcctggctaatttttaaattttttgtagaaacgaggtcttgctatgttgcccaggctggcttcaagtaatcctcctgctttagcctggcctcaagtaatcaagtaatcaaattcctggcctcaagtaatcctcccactttagcctcccaaagtgttggggttgtggcgtgagccacagtgcccagccactgttgcctttattctaaatgttagattgtagcttttcttcttttttaggtcaagcaccaagttcaaggaatagaatttcagttgccacgccttattgtaatagcatatgaggaaacattatataaacagcagaattttttgaacatttaaaaatattttagatttggctcagttgtctgaaacccattgttttcccaatacactatagtacctcctggaatcttagtaattattgatcatctgctgtctagctgtttctgcctctgaggtaagaggttagactaggtggtttctaaggcatcatccacctctgatgcttcatggttttagatttactttctgtgtttcagataaaatggtggagaaatggaagatggctataggttccattccctcaaatttatttggattttgggtaaataaactcaatgggtaaatagtttttataaaaatcagtgacagaattccatttaagcaaaggaatgaatttattcattaattcagttaatcatttgataaagtatttattaaacacttattttgtgctaatgagtgaagattcagagatgaataaaacactgtcccttcccacaaggagatcagtctttggataaatgtcttcatcatcctatcttccttcctattcttctaactccatctccagtctcttcttcagaacattttctcttaagttctccaaaccacccagatgackctttcagcaaaattacaagagacctttaagtctctattatattgcactgtatacccttaagttttccaatactcccttgagggatatggctcatattgttaattttcattaatgtctgtcttaatgcccttcctgcatcataagggaagaagctattctgtatttcttttctactttcatatagcatatggcatactgccctagcaggcagaatatatctgttaactgaatcagatatcaagtggaaatttaggacttggtaaatatatcctaggcgttttcctaggacaaatggtcttatgcaagaatatggcttgtcagaatgatgtttgtgttggtgaagtttctaccacttcctgttcactactgtgatgcaggattcctgttctcacagaaatatcaaagatctatcttgggcagatagcatcaagaatgtagctgctgccagcttggcttgtatctcaggtgccctgcctgcttccgcagtaacaacaagtgagaaagttattctagacttggctcagttgtctaaagcccatccaacttttatccaaactttttttttttttttttttgagacagggtgtcactctgttgcccaggctgtggagtccagtggcatgattacagctctcaccgcagccttgaccttctgggctcaagcgatcctcctgcctcagccacccaagtagctgggactacagctgtgcaccacgatgcccagctaatttttgttatttgattttttttttttttttttttttgtagagacagggttttatcatgttggctcgactggtcttgaactcctgagctcaagcagtctgcctgcccgcctcggcctctcagagtcatgggataaatgggtatgagccactacgcctggccctttttccgaactctaaaaatttattcagtaaatttttttttctagtgcctaagatgtgtcagtacctgatctaagaactgggggatgaatcaggctcagttcctatcatcaaaaaactggggatgcaaacaaggaaacacataaacataacacaatgaaggaagccaggggatatacctaatgcagcctgggtatcatggtaggccttctcttaaagtagtcttgtttcttttgccagatacaggatagaataagggttctgtttgttaaatgttaagatgttctgggtttcatgagagtcattgatctttctgaacctgaaaattattatactatgaggtatttggtaattttgttttttattctgctggatatctgaatcaagtttatgactgatggccattttggctattctagatttttttttatgttgaaatataaggccaatgatttactgcttttgctctcataggtttcctaatgagaggcagcaggggtatagtcattaagaacctgggctttaggccaggtgtggtggttcacacctgtaatcccagtgctttgggaggctgagataggaatattacttgaggccaggagtttgagaccagcctgggcaacatagcgagaccctgtctctacaaaaaatatatatatttttttaattagctgggtgtggtagcatgtgcctatagtcccagctactcaggaggctgaggtgggaggatcatttgagcccagaagttcaaggttatagtgagctatgatcatgccactgcacttcagcctgaacaacagagtgagaccttgtctcgaaacaaaacaaaaaagttaggggaaacctgggctttgaggtcagacagatacaaatttgcatcttggttacaccactctggctgttctgaggaaaatcaaatagaagaagtggggaatgaggtgtgaagttggttaggagactgttatagtaaaggagagtaataatggtaaacatagacgaggatggcaacagaggaagagagtcattttttaatgtattttcgaggtagaactgacaggactggtttatggattggatgttgggagagagacggggaagggcaggaagggacttaaggatgacttctaggtttttagcccaagcaattgggtgaatggtagaaacagaaagaggtagatatgggagcaaataaggggcagagaatcagttttgtttggataaactcaaatgcttattacatatgtaagtagaaatgttaagtaggcagttgtatatactagttagaagaggctgaactagagataaattggagaatcgtcatcacatagttaatatttaaaagtgaaagattgaatgtaaagacctaggaacttgatattgataggaaaaagatccaagactgagtcttgggatattccacaatatttagagcttgggaagaagaggaagatccaacaaagaaactgaaaaggcacagttgatgagataaaaggaaaaccaggtgagtatattaagtgtttgtagaaggagggagagaataactgtgtcggatgctgcagagagatcaagtaagatgaggaccaagaaatgaccattggaattggcatgatagaggtgaccttgacaaaataaatatctgaaaataaatgggatataaaaatcatatataagttggggaaaggatgagaggtgacaaagtagagaaagcaagataactcttttgaggagctttgctgtataggagagcagagaaatggagtaataggtagtagtgaatgtggcattgggaatgtttttaaaggctggataatggagtatgcttgtgacatccacgagagaaaaaaagtgacacagaagagagacaggataactgaaagaaagagtatcttttcagaagcaagaggggatgggaactagtgcccaaggttggccttgataggaatagatatttcatgtattaaacaggcatcaaggcagagtatattattacaagtattggtgaatttgtggattcatttggtagttaaaagatgaggtaatagttctgattgcctcggtttaccattaaagtaagaaatcatgtcattatctgaggagaggggctttaaaattttgaatgattttttaaactaagaaatgagatttaaagaagtgctttctcctagtggcttgcttcaggcagtgtttccagttcaccctgggaatgcagtcattttgctctgccttagttgtacttaggtggacaaatgtgagaagactaatttattcagatagcctaagccctgtagcacggcacacaaggccctggagaagctggcgcctgccttccaatcctattctgtcacgctccccttttatctcctccctgcttctccttgcacccagttctctaaaatcattatcctgccgactttcacatcacagcacctttgtacataatgtgccctctgcctagaatgctctaaccaacctcttttattttctggttaaacttgttatctatactcctcagtttagctgtgacctctggggagctttctctgacctcctcattcatgttcaagtgctttctttgaaccttgcctcattatattaacattatatgtgtctttttctccctaccgaattatgtgctttttgaatacaggcctggcacctagtatcctcttgataaatatctgcagaactgaaatggctatgatgtttttacttaatttttacttataaaaccatgtagccaggtgagtaatagtggcaatctctatagtaagaaacactggtgatcactactttttattaggtctcacataatctgtagaattatttatttgattccaatgatgtgatacaatagatactgaataaccttctctcttccttycttttctttcccagtgtgaagagtggccagattcgaaatctggagtctgcccgtgtctcaatggttggccaagtcaaacagtaggtcttactcttcccccttggtctggttagaggcggaaacatggtgagggaattacagattgcttsttttgtcttacaccaattctaccattccggtaaatgcctttattattttaaataattttaaaggtgagttcagttgggacagacatagattttctttcgcctgccttcctttctctccttcctttccttccctttcttttttttcctcctcatttaatactggattaccttagcaaaactctgcgtgttaaaaagcaaatcccagagcatagacattacaaattatgttaaccttagtgatagcagctgagtttcattctagtaacagtctccttctaagccaaacctggctgtgagggaattataataaaaaagctctggcatagcctgagtgaaagccagattctaagagtgagctaagattatttagcccaattgatctttcctgatagaattacatggcattctgggtattgctgtatagtcacaaaataaactttagatgaattgagaaaatgttgcccaacagaacagacagaagttagatgaaaatgataatggctttgagtgcttactatttgccaggcactgtgcaaggtattttatatgcactgtctcatttttaaaaccttatattatggaaaaattttgcacatataaaagaagagtgatacagtggatggaccccagtgttcccattgtccattttcaatggttattaacccataaccatgtctcatttgtttcatctgtgcccctatgtatttcccctagtcacaaaatattttgaagcaaattccaaacaaatataatttcctctgcaagattttcatatgatctaaaaataagggctctttaaacatcatcacgatgacattattacacgtaaaaaaattggcaattctttaatatcatcaaatatctaatcaatatttacatttctgattgtctcataaataattttttacaattaaagtcaaaatcaaaataagtagatagcaattggttgatccacctctcatgcatcttttaatctaaggttccacttctgtctccctcttttttttgattccttgcaatttatttcttgaggaaaccttgtttgccccatagaatttcccatgatctggatttgctgattgaattctcaggccataatttaacatattcctttgttccttatattctgtgtaaatagttaaatctagaagcttcatcgggttcaggtgttttgtttgcaagaatacttgataggtgatgttgcgtactgccatcaggaagtacataatgtctggttgtcttttttttttttttttttgagacagagtctcactctgtcgcccaggctggagtgcagtggcgcgatctcagctcactgcaacctctgcctcccaggttcaagcaattctcctgcctcagcctcctgagtagctgggactacaggcatgtgccaccatgcccggctaattttttatatttttagtagaggtggggtttcactgtgttagccaggatggtctctatctcctgacctcatgatccgcccacctcggcctctcaaagtgctgggattacagacgtgagccaccatgcccagccaattgtctctttttttttaatgtcaggagccgttgatgtttattacctagattcattaattcatttgcactatctcatttaatccctacaatacctctttaagataagtattgctttatagatgaggaaatagaagttcagagaggtagtttcccaagatcacatagctagtggatgacatagctgagattcaaactcctgtgtatttgacttcaaggcctatcttatggttttatgcctaaaagggcaatttcagtagaaatatcaggcagtcaaaatgcaagactttgaataacctgtgagactgcccacttttcaattcctaaatattttgagacctcaaatttgtctaatcagtagtaaagcattttacatggcatatatgcagatagttgagtgattttaaaattttatttccagtgatgttttctcttaataagtaaacctatgtgtaggagagtgtgtatgtgcatgtgtattaactgtcacatagatagctggaactttcctgccccttataatccaggtgaaattgccttgaacctcctaatccacaggctatagaaattcaaagcatatgtttctttgttacactgttttttttttttttatcacatctatactgtatactacatgtgaaacttggcacaagtttcatataaaacacctacttaacaaaacatttgtgaacttacacttcactgaaggtttggcagagaagacagaaagggagaagttatcattcttaaaaatctaccgctgacttttgaatttatcccagtctctttttatcttgcttgttctctctccttttccttctctgtctttgtcaagggcaaaataacagattgttctctatcatacagagcaaaccttggcactagctgttgcccaggcccttgggatttttttaccttcagagcttgtcaatgtgttttttccatcaagttctctctaaaggaagtatggtaccagctgttgatataataataatttttctaccaaagaatataataaaaagagatgcaatttttaagagaaaaacaacaatgataattggttggttcagatggtttctgtcagctaattaaaaagtgaggccttttatcattctgtttgagccttgttctactataagcagggttcagcagaaaagcaccatgttttggagttagttgagcctggatttgcatcccagccttaaccacttatgagttaggtgatgctggacaattttcttaactcttcagggctacttcataggattgttatgaagattatataagattatgccaataaaactcatgcctgaggaagtggttgctccctttctatgggtcagtattggtgcaagaactggaaaccagcccttggagaatagttatacattggccatgattttccacagccctggaaatgcacaattctatcctcctaccaggatgattgttaagttttagctaacatttgattataaaaggccgtaagtatgagtatctctgagataatttgtgtattggaaagaggtgtgtaatagcacttttttaaaaaaacctaggtgtgaaggaattacaagtccagaaggctcaaaatctatagtggaaggaatcatagaggaagaagaagaagatgaggaaggaagtgagtctataagcaagaggaaaaaggaagatgacatggaggtgggtaaaaacattcattcttgaaaagatgcrgtatggaatggttcaaactgtgtgtgggtgggaaggggtgataacattgttctttttgtttgccattaggtattttagggagccaagacactatcataagagatacttagcttaactataagatgtaaagcactgttgatagctctgaccaattggaacataaaacttacgctatataccctcccctaaaacagactgctttctcacctgttcttctgttcctgtgtttcctcccatgagaaaaattccatttcctaccagtctactctaagctcatccagatctttttttttttttttttttttgagacagagtcttgctcagtcacccaggctggagtacaatggcgcgatctcggctcactgcaagctccgcctcccgggttcacgccattctcctgcctcagcctcccatgtagctgggactacaggcgcccgccaccacacccagctaatttttttttgttatttttagtagagacggggtttcaccgggttagccaggatggtctcaatctcctgaccttgtgatccacccgccttggcctcccaaagtgctgggattacaggcgtgagccaccatgcccrgcctaagctcatgcagattttaccctgtccatctgtctttcaaagtttttctccttgaggaagctctttaattttctttccatttttttttttttttttttcgtttgagactgggttttgctatgttgcccaggctgaattccttggctcacgtgatcatcccacctcagcctccccagtagctgtagctgggactacaggtgcgtgccaccacacccaacttccctggggaagctttctgacctcaattagtatcactgtctttccaacacagcactgaaagtctgtatgacacaccttagcactttttttttgaagttgtacatattaagtcatagaactgattttataagtcacactcagaaatactatggtcctttgctagtcatctgttgactcatgttgtcctctgtgcaagaattgtattccaaacaaacaaaaaatgtgtattttgtggcagaaactgatgttctgcatgaatttccctctgcatttagctcagggttgtataaatagtgttttatgagtacttgccaggcaagtagtggtaacaagtgcttttttcttgaaaatgtttagtgctcatgaacagcagactagggatggtttcgattataaacatcttactaatggcaggtaatgaacatgtaatgacctactcctttgcatttggtgatgctgctgttagcaagaaggagaatacatttttaaacagtattttaaatttgaggatcttcttgccatctttaaaacagtgatcagaaatgtaatactttgtacctctttagagtttacaagggtttaaataacgcatggtctgtttggtcctctgaacaccttatgaggtgtggagagatcttttctcccatattatggtgtagaatctgaggctcagaagttaagagacttgcccaaggtaatcaagaacgcatttagtagatttgagactcttaatataatcaattgctttttacccattatgtgctaagcactatgctgaatgcttcacatttatcatctctaattctcattttagttctgcattgtaggtattatcaccattttacaacttaggtacagatacttgcccatggtcacacataaaagttaaagctaaaacacacccagatcctcgatttttaattctaactcattttttctttgtatttttttataagcccaattatgtggtttcataaactccagcagttctgttgagagggtgaactgaggcacattaaggagtgtccatgagaattcactccccatttctccccaaccctcccagcttaggcaaccactaatctaatctctatagatttgcctaatctggacattaaatatagatggaactatataatatgtggtcttttgtgactggcttcttttctcttaaaataaaattatcagggttcatccatattgtagcacgtatcaaatacttcatttctctatatggttgaataatgtgacattgtatggctataccacagtttttaatccattcatcgcttgatggacatttgggttgtttccactttttgtctattatgaataatacttctttgaacatttgtgtgcaactttttgtgtggatataggcttttattatttgtcttgggtacacagctgggagtggaactgatcgatcatatggtaactatatttaaccttttgaggaactgacagaccgttttccaaagcaggtgcacccttttacattcgcacttgcagtgtatgcgtgttccagtttctcagtatccttgtcagcacttgttattttctctctttttgattatagccatcctagtgtgtatgaagtgatatctgattgtggttttgattttcattttcctaatgactgctgatattgagtttcttttcatgtgcttattgtccacttatatatcttctttggagaaatgtttgttagatacgttgcccattttttacttgggttatttgattttattactgaattttaagagttctatatatattctagatacagatccctaatttgcaaatactttctcccattccatgggttgtcttttcactttcttgatggcattcttagaagtatagacgtttttaattttgatgaaattcaatttatttttctttttgtcccttgtactttkggtattatatctaagaagtctttgcctaaaagtcatgaagatttatacctatgttttcttctaagaattttcttgttttagctcttacatttaggcctatgttccattttgagttaatgtttgtgtatgatatcaggaatggaaccaacttcattcttttgcatgtagatacccaataaacagcctgtcccagctccatttattgaaaaggctcctttttccccatttaattgtcttggcacctttgctgaaaatcaattgactataaatgttagattttatttctgaactctgaattctattctgttgatctatatgtctgcccttatgcaagtaccacactgtctttgttattgtagctttgttgtatgtcttgaaatcagacagtgtgtaagtcctccaactttgttcttctttttcaaggttattgacatcctatatattttttaaaaattttaatacttgtttatgtgccagaccacgctcctgttgttttacatacatgagtatctttagctcatccttacaattctttcagatcttgtgttgccaatttcacagctaagaaaacagtctggggttgggtgcagtggctcatgtctgtaatctcagcgctttgggaggccgaggtgggtggatcacgaggtcaggagattgagaccatcctggccaacatggtgaaaccccgtctctactaaaaatacaaaaattagctgggcgtggtggcgtgcgtctgtagtcccagctactcgggaggctgaggcaggagaatcgcttgaacccgggaggcagaggttgcagtgagccgagattgtgccactgcaccccagcctgggcgacagagtgagactctgtctcaaaaaaaaaaaaaaaaaaaaaaaacaggctggaagaaattaagtaactttcccaagggacccacagtgattagttaagaatggctttgggacttgcattcagtcagatctgactgacacaaagcgttatgtttttaaacacttttccagtgaaacaatgggagataatgcaaggcctgtggtggatgcccttgtgtggagaactgcatctcgcccaggtaaacatcccaggaagattgttagccaactttctgtttctcccacccaacaacaagtggatctcattatatcagcctgctttattaccattttcacagcatctaataggcatctaaactaaacttcatgatccagctctttggagaaaggatttatttccaataacctaaatacagaagaaatcctaattctgtccagaatttttttttttggttttgcaaattttaagatttgagatgaactgttatatatatatatattataatgttactttttggaggttttcttaccttaaatttgtcatttccctgtgaagttcagtgtgcatgtaggaggggcttgtgagattatgccttgtctctgacggtggagctgatctcttagaaatggctcatagtgttgtggggaataggacaggctgaggttccaggttgaaatggcagtaagtgtttcctttaaagtgtcctatccctggtaaatattaacagtggagaatagaattagttctttagtgagaatatttgaatcataaggtacctttgtatctccttttactgatggaagaccaaggcccaaagaagggaagggatctgagaaaatcagtggcaaagataggactagaagacccaagtttcttgatttcccatctggcgatctttttctttttcttttcctttctttctttcttttttttttttttactgtgataaaaaacaaaaacaaaacaaaaaacaacccataaaatatgccatcttggtaatttttaagtgtacagttaatattcacattgttgtgaaacatctgagattttatgcctattaaacaacaactccccttttctaaaactcttccaaaggcccctggttgccaccattctactttctatgaatttgactattttagatacctcatataagtgggatcatatattatatgtctttttgtgactggcttatgtcacttggcataatgtcctcaaagttcagtccctatgcagcatgtgatagcatttctttcctttttatggctgaattatatatgtatataccacatttcgtttattcattcatccatcagtggccatttgagttgcttccacctcttggctgttatccatagtgctgctatgaacatgggtttgcagatccctctttgagattctgttttcaattctttggatatgtacccagaagtgggattcctggatcatacagtagttctgtttttaatattttgaggaactgccttgatgtttttcttattggttgaactattttacaactcagtacacaagggttccttccgaattctccacatcctcaccaacacttatttttctcttttttgatagtagtcatcctaatgggggtgaggtggtatctcattgtggtgttgctgtgcatttatttattgattagtgatgttaagcatcgtttcatatgcttattggccacttctgtatcacctctagagaaatgtctattcaagccctttgaccattttttaatcaggttactcgatgtttttagttgctgaattgtaggagtcctttatatattctgaatattaatccattataagatatatgatttgcaaagattttctcccattccatacacatagtaccatttgtctatttttgcttttgttcactgctttttggtgtcatatccaagaaatcattaccaagtctactgtccagcttttcctccatgttttcttctaggagttttatagtcttagtcttactaggtctttaatccatttgagttaatttttggatatgggataaggccccagcttcactttggaatatgcatatctgtttggttatcccagtactgtttgttgaagagactgttctttccccattgagtggtcttggcagtcttgtcaaaaatcatttgactatttatgtgaaggtttatttttgggctctctattctattccactggtctatttgtctttacggcagtactaagctgtttcaattactgcagctttgtaattggggagtgtgagttctccaattttgttcttcttcaaaattgttttggctagtcagtgtctatgagattccatatgaattttaaggtgattttttttatttcctaaaaaaaaaagccatgggaattttgatagagattatattgaatctgtggattactttgggtagtatggacatcttaagcatccagtgatctttaagataatatgttactatctcatgttcacttttagattttcatattgtggttgattcagtatatttatttcaattataatgtttcaaatatttcaatggtacagaaaaatatagagaattatttattttttcagccaatatttgattgcatactctgtgcttatctacaataaagatttaataaatgttgacattttgtcatatttgtctcatatttcctttcaaaattactattgcaggaacattatatcattatcataaaatataagaaaaaatgctctactgacaaatcaacctattttcagttttcctttttagtactttactataccacatttttccagtagtaatcctaacttagatgacatgttgtaatctgtttcttgcttatattataagcattttttcatactgcagtatgttctttgtagttattcttttgatgaarcatccttttgccaaccaagtataagaaaggcttaatcttggcactaccacttactagctttgtgatcttaagaaagtttcctaaattcacagaaactaatagcaataaaaagtaaacttgtaattatcttaaaatgaatattaacagtgacccatacaacaagactgttggaaggattgaatgtatattaaaatgtctaggacttagtaggtccttaataagtgctagtttccttccctttccttttcccagggatctagtttttaatcctgttcctccaggggttgccctcggagactcagaacttgctcttattcctccagaccaagaaagaccatccatacacctggagaattgaactggcaaaaacagaaaaatactgggacggctggttccgaggcttatccaatctctttcttagttgtcccattcctaaattgctgctcttggctggtaagtgtatatgtgcatatattagtcagctcaggctgccataaccaaatatcatagactgagtggcttaaacaacagaaatttattttctcacagttctggaggctggaagtctgagatcagggtgccagcatggtcaggttgtggtgagggctgtcttcctggcttgccttctctctgtgccctcacatggccgagaaagagtgaatgtgagctctctggtgtctcttctcttaaggatattaattagggacgttcatcctatcatgtcagagctctgccctcatgacctgaggttacgtccttataggccctagttccaaatacagtcacattgggaattggggcttcaacatgagttttagggggacacaactcagtccatagcagtgttggtatattgtcatctcaatatgacctcattaaaacttctcaccaaatgagtagtgacatccaaagtagagtaccttcctcattcatctatgccttttctcctccccacacccagtctctaaacctaactaagcataagcattcatctaagcataaaggatgacctaattctggcctggcctgtctacttggtcaagctcaagtccttcttagtctagagctagatgcagtggtataaggatattctgattattatgagaattaaaatagtaaaaccttgttttcagaaccagtttaacatagtaattataggggaatctcaacctgaaaagttttatctggtggtgagagtatgctctgggagttaggattggtataaacatgaatggagaatgtcatcatatttaaaactttgtaacactttttacttaatacgtgaacagcaaaatctgtttcacaatgaattctcttgttttctaggtgttgatagattggataaagatctgaccattggccagatgcaaggtaagttatcaagaaattatacccctggacccttttctgaagaaagggtgatagggcagttaacatcctgagatagtgaggtataacggagaaagcatgagctttagagtccgacccaagttggacatccgcctctactcctaacacactatatgattatgggcaagtatttccctttcctgagctttaatttgtttaaaaaaaaatccatccaaaaatgaagattataatactactacctatgtctcagttataagagttaaaatgaggcaatgtgtttaaaaattataaagtactgtataggtgtatgatactgtgaaaagagatattctgactactgatcagttttttgtttgtgggttttttttttttgttttttttttgaattggagtctcactctgttgcccaggctggagtgcggtgggaccaatctcggctcactgcaacctctacctcccaggttgaagcagttccgggcctcacccaccccagtagtgggattacaggcatgcaccaccacgcccagctaatttttgtatttttagtagagatggagtttcaccattttggccaggctggtctcaagctcctgacctcaagtgatccacctgccttggcctcccagagtgcgaagattataggtgtgagccactgcagctggccagtatttttcttattgttagaagttttaggaaagggaaaggctcaagataatccagatataaaaaggtataaatacctgtttagaagacagcatggtaagatggtaaaagtaaggtctctgaagttcggaaaactgagttttgaatactgcttttccagtaattttttgactctgggcaagttatctgacttgcctcagctttagtcttcttaatctggaaaatgaaaaaactgatggcagcctcaaacagatcgtggggtataatgagtaggaaagtgacatgctgagcactgtatacagatgcatgtatgttagctagataacagtggaggcagcgggtccaattttgtgggggctcttgctttagtacgggtaaaagactcagtgaaggtgaagccagtaggcatacaacttttgggttatgggaagaagaggtgccaactccaagaccaaagtttcaggctcaggcagaatctgttctagacctttcttccctacttactctccctggacaatttcatggcttccatttatatvttgatgactcccaaagctaaacatccacctcacccctctctcctgagatccagtcctagcctatgtagcaaacctgctggatatctcatgggcctctcaaactgttcttttagctatcctcaagctttccacagcaaaaggagctatattctctcataatagttgttcaaaggctctcacatataaaactctggtcccagaccttcatggctttgccttcctttaactacattgtatcctgaggcctagaataggactatgagctgggactgtgtgattttttttccatggcactgatgttggtaattatgggcttagacacttatttaagtagatgcttataaatgtctaagcccgtaattaccaacatgagtgccatgaaattgaatctaagacacttaagttcaattcaagaaacctttcctaggcaccctttctgtgcaagacctatgcatgatgctgggcagacagaagaatcagatatggcccctgagactgcctgaaggcagttgacatggactgggatagcatttgaaatcattgttgatcaccagccttggaatcagacaatcctgggtttgaatcactgttaatagttttgcggtatgagtgaattcctaacttatttaattttgagtttcttcatctgtgaaatggagataatgatatatctcagtacagttacatgaagtttaaatgaaaaaaatgcgggtagtctaacaaatgatgcctttcattatattcaggaagtaatcacgattccttatgagatgtcctcctgtttcctcaatatggattatatcaagaccaccttctggtttaaagaaagcctcctatgagtatagagagtaaatggcgaggataaggaacattccacagaacaaagggaaatggctaaggctgcatagattccaaaccacagctttgccagcactgtgttcaaaccaactgacttagttatgaaatcctggaaaactaccacctattcatagtaccccttgggtaaataatttaggctctctgaacctaaggctcctaatctgtgcaatgggagagaagagtttggaaatattcccacctcatagaataatcatgaggattacccatgaacatgttattttatgtgtacctggcacagtgttgttggtgtatgtgagttctctctgattatacctactcttccaaagaggaaggacaaatgcgtccctagtcatcagagctgatctaacagaaagaacagggagattggagttgtaagttttggatctagtcatttgttcatcattcattcgctaaagacttaagcatctactcagtgccctaccctgtgttaggtcttattagggatatagagcaagtaataacaccattgtcccctgttcttatggaaatgacacactcctggggaggcaagcaccagtggcatgtaaaatgtaaacttacttgaaacttacaagagggccatgtgctgctctgtgtttggatccaagtgcattaacaactttaggagctagaagggagaggtgactaggcttgagcacccagagagaggcagcttactgcaggaggaggggcacaggatggactttactaaatgggatcatcttattcctccactaattaatgaagtggccttgggcaggttacttcactaatcatggcctcagtttcatcatctcagaaaagaatttcagtatttttgtgcttaattgtatagggtagattttgagaatcaactttaaaaatggatagaagaatacactgaaaacttttgaatcctgcgtaactggggtaagaaccacaggatgtaatgaccagaagaactttcaagcccattcctttattttataaatagagaatctgaggctgagaaaatctgctgtctctacttatgggggctctgggtctcatatcctttagtctccttagggatcttctttatcagtcatcgctgttcattctcaatcattgtcgcattagttacgagcttacagtgttctgtaagacagtatgagaaagtgcttagtacaatgcctggcacatgcttaagtgctcagatggtaacttattattgtaataatacattttgaatccttaacatagcttacaaaatccttaatggtttggcccctgcttacctctccagccttattgttaaccactctcataagcaccatgccaagcttcttgtattccaagccatttcaagccttccttccttcctggttccctcttggattgtgaagttccctttcttatgctcttacagccccatgtagccagttttatcataggaatgacatgctgcattaaaatgttggtttttgtgttttactcccctactggactgtaaatcccctgaggacaagaactgtttcttctatgtgtctctggcccacagtaaatgtacactaaataggacagaaggaaaaagtgaagggaaatgattggcgcaaggttacaattacttgtattaccatcctcagcaagacttgataattgggtccagagtattgaggtgaggttggaaatggggaggtaggtcctgggctcctggaatgacctatgaggctgcataagagagggctcttttagtcgctgaagttgccttgctttgattcctctccagggaagttccagatgcaggtcctaccccagtgtggccatgcagtccatgaggatgcccctgacaaggtgagtctggtgctcagtgactgtaaaaggacaactgtgagaataaccctggatgtcacagaagacaagtctctgagtctcagcctgcattgcctgcagcagctgctgtggagcctatgcagatgcarttccaccagctctccaacttctccctggcagctgcttatggtattggttttgtgtatatgtgctgaggagctactgacactctgctatttcatcccagggccctgtggttaagatcttaagctctacttctccaatacccccaaaagccagagatggaagagggatgattagggtagaaactgctccctaaaccacaggcacagttaggaattaatatgggctcctcctgtgagaaaacaccattctgtaactctgagggcacacataagcccttcacgtcattcctcttgagctctatggagctatccctggcaaggatagtggggaggagtcttctagctctgctagggagggcctaggtccttttaatttcaagccactcagacctgtgggtgggatgagggcaccgtagagcctaaccatctaacagtagctcacagcccaaggctaagccccatcactaacctttatatggcctggaatatctctcccatttccaggtagctgaagctgttgccactttcctgatccggcacaggtttgcagaacccatcggtggattccagtggtaaggcgggtacaagggtttaagaacccagcagtgctggccgaatctgacaagcagacacttgyaggactgtaaatatctctgccttacccctgcctggtttggtcaccatgcctttcttcctcctcctcagtgaagagcctggcatgtctgtttctacaaagccatggttggttgtttctttgtgctgtgctcccacgggttgatgctgaggctgtgattaaattgtgcctagtctcactccccactgtgatgtgcatttcttcttgaggtgcccctttgaggaggctgggataggaatcagtccttttccaggctcctararaagttttytttggcttctcctgccctgctgccaaggaaagctgggcaggccatggagcagggcttttttttttttttttttttcttggcacagtcttggttcactgcaacctctgccacctgggctcaagtgatccagtgcctcagcctcccgagtagctgggatcacaggcgtacgccaccgtacccggctaattttgtttttttttttgtttttttttttttttagtaaagatggtggtttctccatgttggccaggctggtcttgaactcctggcctcaagtgatccacccgcatcggcctcctaaagtgttgggattatagggattataggcacaagccaccgcgcctggcctagagcagggttttctacagtgttgcacagtgtcttcccatggccagctactaagcaagctgggaatggaatgggtgcctctgccaggcttgcttcccctccctttccgaagctggcagaatattagccactctgcaggggtgatcctggaagctctagagcagggttttcaacctcagctttattgacattttgaggtggataattcttcattgtggggactgtcctgtgcattgtaggatgcttagcagtatccctggcttttacccacctgataacagtagtacccctcccacacamggttttgacaaacagaaatgtctccagattttaccaaatgcctcaagggaggcaaaaattccccctctattggtctagaggaagaaacagggccaggtctctcatcctaggtagctcttcatctgtttagggaaacacagttgggctctttgttgaggaagaagagaggcatgttgaccaaaccaggtggtattgacccacctcagccagctcctagtctgtactgcagaaggcctttgatcctcagagagcccacaaccctcatgaggagtcattcctaccattgaaaagtctcttctctgattttggtgagggcttggggaaacttgttccccactctcagaaagtttgcagaagaaatattaagaaaaggaaatggcttctgcgttagagaactctgaattccagggcctgggagatgagagtgacagggcagggtaagcactggagatgatggcaagaccttgggacagtgaaccacagaagcgacacccctatgctgagccatccctctaacaactgaccattcatggatcccaggaaccaacaataaagacttaatttctcttactaaacagtgtttggctggggcccttcgaccatttggagccttgggcaaatgagcagcacactgagagcagaccctgggtccagctctggtcagggctgtgaaatgggtcagatttgccagggccttggtggtcattagggagggcttcctggaggatacagataagcaagggaaagctattgatagttacatttgtttttccttctctttctgttcttccacagtgtgtttcctggctgttagtgacctgctgtccacccctcctcaacatcgagctctgttgtaaatacgtcgcaccagaggccactgtgatgccactgtctcctctccatcccgcccagccatgtgacactggctcccggtagacgggcaccccragatgtaccaaccttttcatgtattctgccaaaagcattgttttccagggcccttgaccaacatcggcttccccagtccagggctyccctgctcctttcccttccctgtactggggtagctcctgcctgctctccctgcgttgcctagggtaaagcctccagatttgccatactgagcccctcttcctagcatcaggcgatacatctgagttcaaatgtcttcccaggctcagggacctccattccttgagattgtcttggcatggcccagccctgcctcatgggatggacaatgcatggggtggtctttatttttccctttcaaataaaacactagtcaggtaccgttttatcccagtcgtactcttccaggtttggaagacccagagaggccaagatcccatccttagccatagcgagcggtggtggtggatagcatcacaagaaacgagcctgaaaatcaggtccagccggtccaagcacatggcctcccatctgggagagcccactgtcccactcccacatgtctgggcacctgccctgggctgaggccaggctgctccaggggcctcctgcgccctcacctgccacagagcaacccaggttaaatacagcccatgcacaaagccacaggccaaagcctatggaattgtttttaatcatcaaatttaaccattttcataactggttcctggaggtgtgcagtgcccccttgcctcttcaaacctacagcttctctttgccatttgtggatttcacatcactccacacagaaacattacagcctggcatccccagtctttgccttcttccagctgcctcgacacagcactgtggcctgtccctattgcccaggcacgccatttccaagggcaggaaggggcagtgtcctgaagcccatcttttctgtgactgtcttaggtgatgtgtagccccctccacctttccactcaacaacctcccacccctgtcctgctgcatggtccggagtctgggacctactttgttttttgttatttatgaccttgtttaaagaaaataaatatctcccaacctttattggtctggtctttctctgtggaattgtccttatttctgctgatatgggggcaggggacagctcattggacttagttgtcatggaactccagaaacccctttccctatagcccttcagtgtgttatgctctgcctgtcccctgatccagaatgcccagtgggatggtcagagccaccctcctctgcagccaggatgggattccagtcccatctctcctaattatcggctgtgtcgactttggtccagagcaggacaatctgtgcactgtccacatgatctcagtcaccatagcttcacttatgtgaaacttcatctacaacccaaatcatttcctgagctctgaacaggtaggcccaggttcctcctcctgtctctcccagatgaccaaaagccacttcatattgactgtttctaaagctgaatccaccttcccccggaaacttgctccccatgaaacttgctcttcctccagcgtttcctggctcaataagtgataggtatcaccatctctccagttgtccaaaccagatacccacagtgaatgacttctcttacacccacctcaggtctaccaccaaatcctgttcatcctcttttccgtgtccccctcttttccatcccacagccagtgccctagcttaggcctcatcatctctcactttgatcacttcagtacctttgctgccctcctcccccctgggtggtcctccacactgttggaggcttcctcctagcaggctctggggccagagtgtctaaattagaacccaagccccaccccttacactgtatggtatggcaacaaactttctctctgctgtagttcactcatctgaaaaatggagataaaccgtacctaccccacagggtcttgaggattatacaagttaaactaggttaactggctttctcactaactggcacatggtaagacatttaataagtagttcctgttatgacactgttacattgttatagttaggaactttattcagggccgtctgtgggccaatagcatcagtatctcttggaagctcgttagagaactgtgtccccatgtcagacctattgaatcagaactgatctgcattttaacaagtgcatcaatgtctgaaaatttcttgtctagttgatgatgaaatatttcagggtagttcatgagctccctagtagaggagagaagttccttatgtgtggtttgatttctctcaccggaacactttgcgggtgcctttgctgagctatgtgccctcttgtccacaagagggcagcatgatcacttggttttcaggggcactcaggttcatcaggttcactcaaattttgaatgtcatctaattcacttgacacacatctcatttaatcttcacagcaactctatgaggtaggtgctgttatgttccttttacaggtaggcagacaggtccaaattctacagcttggaagtgactgtcagaattcaaaactggcttgcttccacatcattctgttcctgcatgctacaagggaccctgggcagaagtcattttggaccagatacttaaaagagcagaaggaggatgaccgtggagatgaaccctctttacacttgatggaggaggctgagaatgaatgaaatgctcgtgagctttgtggttggttgtgttttaggcactttcatctccattcatcctttgtatccttgtgaagtacaggcactatccccaatttaaaggcaaggaagcaaaagctcagacatttgaaatggcttgcccacagccacggccagagtggcagcatctttgtcttctgattccaagtctactgagcattccattacaccccagaagagaagggaccattcatgtgttcacttaacatggctttaacgagcacctactatgtgttggccataacagtgtccttgcagagcctacagatcagcatgtatgaactcaggaagggaataaagaaggagatcccagaatccttgaatgaaggattgccacaaagccagaaggagcatgtttgggacaaaccaaaggccctgtcacatagacactagtgaaagtccaagggaaactccttcccaaaaaaggaaggtaggcacattttggaggcagatgtagatctgatgggggacagaatcttgagactgggaggactgaagacaaagccatgaggggaatggggcatgacttcatagccccacgctcttaacatactgttaggagcatttgctgattaagcaaacccgagcacccaatatgtgccaggcatccaatggactttgtagacagaggtaaataatgaggctcttaaaatgaactcattgtctagagagacagtgatagaaatagtgaccacgttgtaagaaggttgggggtgggcagtaactaaacctatttggaaacaggccaggaatggtttcacaagaggtagcattttttctttcttttttttagacagtctcctctgtcacctaggctggagtgcagcagcacaatcttggttcactgcaacctctgcctcccaggttcaagcaattctcctgcctcagcctcccaagtagttggggtttcaggtgcctgccaccacgcccagctaatttttgtatttttagtagagatggggttttgccatgttggccaggctagtctcaaactcctgacctcgagtgatctgcccgcctcagcttcccaaagtgctgggattataggagtgagccaccacacccagccaagaggtagcatttgagttgagccttgaagtatcacaaagtggaggtggaggaggaagggcaagatatctcagaaggaacagcacagacaagcgctggagacttgaaagtcagcctaggaagaagactgtggctggagtatgggccgagataggagaagagccaggagagaaggtgggagtcagggcataaaggccttaagtggcaagaataaggagtttccagaagttattaaataggcatgaccccatataaaaagacaaggtcaggtcttttttataaaggaaagtcactctggtagcctgtgtagatggattggtgggtgccagacatgaggccaagaggtcagtaaagaggcagttgtaatygggcaaggaaaagacacaggtatacttaattagaacagtggccactgggctgagagaacaggatagtctcattattttggaggtggaatgaacaagaaagagactagttagatttcaaaagtgaggggccaagaacccttaagttggatgcaggggcctgtcatgagaagtgggggttggaagtgaaaggtcaagattttaccaagggaaaagcaagaagagagcctacactagcagcagagaaagcaaaacgcagtcacactcctccctgcagtcactgttttgtttgcaatcttggagccaactctgctgctccagctggccaccccatcagcagccagaatcaactcattctcagtctggggccagggctcagaaagttatgtcaactcaagaggctcccttattcctcgagctggcttcctctcccagcagtttgctagaaaactccagcccatagccaggcaaaaccttgtaacccaagactagcagaaaggctggattcttccaggtgcaggcaataggtgactgaggagtgaatggagtgttgacagagacagtttcttcctgattaatgacaatgatgccattccataatgacttatagaatgactaatcaaacaagcttagaataactgacatgatacagtctgtatcatttataaagcacgtttacaacctttgagacctcctaactcctctggagtggggagggcagacaaatcagcagtgcctcctacagatgaggaattcgagggtctgacaaggaaagtgatttgtccagggtcataccttagcacaatctggactagagctcaggccacctgacttccagacgagtgcctttttagtcccacaccatagcagaaggagaggaggggtggggcaggggcatggaggactaggacctgataatgagaggaatgctccaagctcagttcagcctcctactagctgggtgacctctggcacatcacttccttcagaacttcaggttctgcatcccaaaatggggggataatccttaattcactaggtgttatgagggttaaatgagacctaagtatccaagtatagtaaaagctgctgcctgcagtaataaggtgaaaaacagtaaatgccatggtgctaagaagataaggggattcattcatcctgactgggaatccccacagggcggggagaccaaggcacagcaattctacccctactcctgctgggtagggctgctcaggcagaattagtggaagccggtgtgcccctggggcctgagagcagtggcccatgctgcatcctccctgggacgtccttctcaaaaaacttttggctgggcacggtggctcacgcctgtaatcccagcactttgggaagccaaggtgggcagatagtgaggcttggccaacatggcgaaaccccgtctctactaaaaatacaaaaattagccgggtgtggtggtgggtgcctgtaatcccagctactcaggaggctgacgcaggagaattgcttgaacccaggaggcaaaggttgcagtgagtggagatcatgcatgccactgcactccagcctgggcgacaagagcaagattctgtctcaaacaaaacaaaacaaaacaaacaaaaaacttttaaccaggattttttaaaaaaatagtaaactctacctaacacagtatttctcattttaaccatgtggaaatgaacagttcagtggcattaattacattcacaaggctgtggaccacaccactatctataccccaactttttcatcatccccagcaagaactctgtacccattaagcaataactcctgcctgcgtccccaagctctattctgcttttggtctctgaatttgcctattttaggtagctcataggtggaatcctacaatatttattttgtgtctggcttatttcatttagcataatgctttcaagtccatccatgttgtagtgtgtatcaaaattctgttccattttatggctgaatattttattaaatgcatattccatattttgtttagccattctcttgacggacatctgggtttgcttccaccttttgacgattgtgaataaagctgctatgaccatgggtgtacagctatcattccattctttcagatacatacctgggagtggaataactgggtcagatgacagttctatgtttatctttctgagaaatcaccaatctgttttccacagtggctgcaccatttcacattcccaccagcaacgcatgagagttccagtttcttcacatccgtagtgacacttattttctgttttttaattgtatccatcctaggaagtgtgaagtggttccttatttgcatttcaagactgcaaatgtggagggagaaggagggctttagggtcagaaatgtgggctgatgctggctggcccagggacttggggcttgccctacctgtcccaccccaacatcataagagacagagggacccagggagctggatagggagggagggtgtctctagccccaggccctggagggttcacaaggcttagcagctcacacagtggcagcaggataaaaccattcattcagggtgagcccgctgacaattcctgttcccctttttgttgcaagagagtaaaaaacagagattctagaaccccagaatctggagagaattgtgagagtttctcacaattgggaggggggccccttaggggaccatgtacaatttttaaaagaagatttaatgtaattttttatttggtaaatggaaaaataatgtttttccaaaaaacagattacagatcataaagttagacaaaatcttttctcctagagtgatatatctgcatttgtaagactaaagaaagctttaggtttatcaaaagagcacaaatggttttattaggttggtgcaaaagtaattgtgtttt

SEQ ID NO: 95298 - DNA, 150890 bp, Homo sapiens
caggagtttgagaccagcctggccaacatggtgctgccccatttctatttaaaaatacatatatacaaaaattagccaggcatggtggtgcatgcctgtaatctcagctacccaggagggtgaggcaggagaatcacatgaacctgggaggtggaggttgcagtgagctgagattttgcctcggcactccagcctgggtgacagagcgagactccatctcaaaaaagaaaaacaaaaacaaaaagcaaacaaacaaacaaaaaaacccacctcttctttataaatcactcagttttgggtatgtctttatcagcagcatgaaaatggattaatacactgtgtatgcaataaagataaattttattttattttattttttgagacaggtcttactctgtcaaccacacccaggtgggagtgtagtggtgcgatagctcatggactgcaacctccgtttcctggactcaggtgatcctcttacctcagcctcctgagtagctgggaccacaggtgtacaccaccacacttggataattttttgtatttttggtggagatggggttttgccatgttgcccagtctgctctcaaactcctgacctcaagcaatccatttgcctcagcctcccaaagtgctgggattacaggcgtgagccatggcacccagcagcaataaagagaaattttaaaacgcgaatctcaacctttgaagttttgtgtaattcaaaagaaaatatatgatttttcttttttgagttatcttgttttccggtgtaaactagaggttaatcatatacaaaaatatttgcaaacagccagaatcagtctccaacaatgtacagtggaattctaaactttaaaattgttccttgaagatcaccacataaaaattgtggagaaggtcattaaccgtgcaacaagaacaaaaaaatgtaaggaaatataaattaggaaaagaaaccattttctaaagaataacaggagacatggcaaaagcactggtcttacattgccagaagaaatataaagactaatgcttgaatgtcttaataattttcttcaagaactattcactctttcttaagaaaaggatcgaatattttcaagatttgctgtcattcagccattttctcacaatacaccatagaaaagacaacccacagagtggttgaatattgcaatgcatgtaactgagaagaactcgtaactaaaacatggacaaaagaacttatatagattaataagaaaaaagactactcaataaaagtagtctttaggaaaaataagactactcatttttcaatagaaaaatgggcaaaagatgtaaacagtcaatttaccaagaagaaagtccaatgaaaataaacactgaaaagctgccaaacaaaaataataatcaggggaatgcaaattaaaacagcagtggatacaaccacttccccaccaatacggctgctagagcaagtttgattaagaccaagtattattctcatttaaacagcatatatactaaaattgaaaggttacagagattagcgtggcccgttcaaggatgacacatatatttatgaagtgttccacattaaaaaaagatcaagtgttgacaagaatgtaaagcgactgaaactctcatatatggctggtcacactggtgacactttggaaaaaatttggccctatttgttaaagcttaaggttgcatgtcttatagcaatttctctcaactatgaatagcaccatgcaaggtccgtgggtgttttgttttgttttgttttgtttgagacagagtctcactccatcgctcaggctggagtgcagtgacataatgcaacctccgcctcccaggttcaagcaattgtcctgcctcagcctcctgagtagctgggattacaggcatgtgccaccacgcctggttaattttttttcgtttttctttttttttttttttttttttttttgagatggagtcttgctctgtcgcccaggctggagggcagtggtttgatctcagctcattgcaacctctgcctcccaggttcaagcaattctcctgcctcagcctccccagtagctgggattacaggcacctgcaaccacacctggctggtttttgtatttttagtagagacgggatttcaccatgttggccagtctggtctcgaactcctgacctcaggtgatccacccacttcagcctcccaaagttctgggattacaggcatgagccaccgcatctggccgatgcctgtctaatttttgtatttttagtagagatggggtttcgccatgttggccaggctggtcttgaactcctggcctcaagtgatctgcatgcctcggcctcccaaagtgctgggattacaggcatgagccactgcgcccagccaattttaactttttgtcatagacttatgtatattttatgatagtaaatgataaaatagactagtaactacatgtatcttgtgaattcatgacctttttattaaatgctttgatatttctaggctacacaggtcattagtaagttttctgaaattgtcacaaatctccaagaaattttccaatatatttattgaaaaaaattcacatacaagtggaccggcacaactgaaacccatgttgttcaagggtcaactatatattcatattaaaaacatcatttgcactcctgtctggaaggtgatgaatctaaaagggaaggtgtcaagccaacactgaaaacaaaaataaacaagaagatgatgtgatttgatatagcacaagatacaggggatggtttgaactgagcaccagaagcgtaagttgtatagtaaactttttctcttgtcttcaacatactggggcagtggtcccctgctaagaacataattaaccttttggcttaaacaagtagtgagagggtaaaggaaggcaggagcctcactccctgggactcagactccagttcttaagctgcacattgttccctggagtaggggagttgggagagaaagaaggtgccttagcccattttatgttgctgtaaaggaatacctgacactgggcaatttataaagaaaagaggtttatttagctcatggttctacacgatgagaagttcaagggcatggccctggcttctggtgagggctttcgtgctgcatcacaacgtggtgaagaaggtcaaaggggaagtggacatgtgcaaaaaggggaacccctgaggggcatcctggccttataacaacctactgtggtggaaacaagcccattcttgcaagaactcatgcagtccacggaaacagcaccaagccactcatgagggatctgctcccatacaccagaccacttccattaggcctcatctcccaacaccaccacatcagggattaaatttcaacatgagtttttgtggggacaaacaaatcatatccaagccatagcagaaggcaagacagaaaaatggcatgagtaagaaatgagccaactggttactacttttgatcacttggacagggtaggcataggcaaagaaaagattttcactgggataaacatcattgttatgtaccccagactgtcttgttccccagattttgaacgagcgaactttttttcccttaaaagtccatagctgcataattctgaaggcattggctgcaagtttccatttttcctttctcaaggttcaagaagtgcccaagtatttttttcttttcttttcttttctttttctttttttttttgagacagagtctcactcagttgctgaggctggagtgcagtgacgtgatctcagcttaccgcaacctctgcctcccaggttcaggcaattctcctgcgtcagcctcccgagtagctgggactacaggcacatgctgccacatccagctaattttttatattttagtagagatagggtttcaccatgttgcccaggctgagctcaggcagtctgcccaccttggcctcccaaagtgctaggattacaggcgtgagccactgcgcctggcctatatattttttttgatcgataagaagtgtattcatttatttgcacagttctgcaggctgtgcaagaagcatcgcaccagaatctgcttccactcaaagtaaataatgtcaaggtttgttgtcattcagccattcaggaaggcaaaggggagcaaacatcacatggcaaaagaggaaggaagagagagggaggggggtgccaggctcttttcaacaatcagctttgcaaaaactaatggactgagaattcactcctgcaagggtggcaccaaggccttcatgatccaaacacttctcactaggttccacctccaacatcaagtattttcagatgagatattttctagcctgtcttaagaatgattttacaatttttccaggccatttgccctcctggcaaccttccgtgttcaccttctggcaggaaattttcttacatgcctacctggcaaaatattgatccacttcaaaaattcagcttaattttctccttctctagactatattatattttatccaacatattttataagtatataatatataatatatccaatataatttaattatatattataatttataattataattttattatatttataattttaatttattaaaagaaccagggaacacatttatattatataaaatataaaattgtgatacatgtatatattataattgtattatattttatccaatataatatttggataaaatatcaaaaataattttttggataaatttaagaggtagcctaatatataagggtgacttttcagtccaaacaaatgcagacaactcatacatctatgtgtgcacttactggtttatatttcagtagtctcttttcttgcttgtctccatctctaaagcatgagctccttgatggaacagatcaccttgggacactatgtaatacagcatactgcttaagtgcatagagccagcacttctgggtttaaatctcacacttagggaatgtgtatccttaagtaggtcatctagcctttctgtgcgtaagttctctcatttgtaaaatgggtataataatagtagcaactttaagtaaggtaaaagtgagagagagagagtgagagtgagagggagcgggagagagacagcgagggcgagcgctggtcttgaactcctgggctgaagcaatcctcctgcttctgcctccctaagagttgggattacaggcgtgagccaccgcacttggccaaacgttttactttttaaattagattaaaaaccttttaatgaccgtcattgagttacagaattttttttttaataaaacgtagcctaatatataaaagggtcattgtttccaggtcaaacaaatgcagatagctgtgttggagggcagagggaagagggagacttggaggattctggcaggaaacactcgactttcctccagtctctgcaacatcttcccaccgtcttgcctgccatatgcaaggtccctccagttccttttatttacctgtcagaggactactttctccaggaagccatctctggcgtcccacgcttaggctctgtcaggcaaactgatcgcccttttatgcaactgtctgtttagctgtctgataccacacaactgtgacttgcgcattggggctatgtctgatttttctctgcggagtactcaggaaaggaacgactgatctcttcaagcgaatcctgttaacagctaagagcctcctcttacttggatccctattgttgactgatggagacggtttccctctccatcagtcactccttgcctctcagtttctcagcctcacctggaaactttagaaatgaagaccctcagatgtgctcccacgttctttcagcgataatctctacaaccttagggcattagctccgccccgtctcggctcctgaccccgccccctcccgcacgcctccctaagcctgggtcacaagtacgcatgctctcccttcttccccgtagcgtgatgacgtaagcggcgttggcgtggtgwggtaggagtggttgcgcgtgttgcggcccgggttctgttcgtaggtttacaattgtcgcgggtagtggggcgccccagctgccaactgcacgtggtttctttctggcgtttgcctagtgtcctgtccattccgccccgttgggaagtgggaagcggagaggttctgtggggacagagctgggagtcctgaaggagaaagcgcgcagccgaggggctctggagtgccttagagcagagctgcggccgcggaaggggagcagctgagaaaggagggccgctgcaggcggggttcgaaccgtggggtctgggctgctcccgcggagggcctgggcggacgcgggatgctgggggtccgctgcctgctgcggtccgtgcgcttctgttcctccgcccccttccccaagcacaaaccttcagccaaactgagcgtgcgggacgctctcggggctcagaacgcgagtggggagcgcattaagatccaggttggtgaatgggaagggagtgggttttttcttgtagggacttttatatggcacatccacatctagcttttcttttacagtcgggtcagacacaaccgccagcagggaaaagttagaaagtgtaggcgtcgcgggtttgcacttttctgatttccattacttttcacaaaactgttccgataactgtaaagcgctggaactttgctttcatgattccagggtattacctgtaaacttgttaatcataccaaaagtgtaaatgaacaagccccctttctctatctttatcccttatamtgaatatccaggtttataaagtggttgtcttgacctccctccttgagagcagaaaccgtgtcttacctgcctttgtattcacacatggctgacagcaaatacttgttcaaaccatgccttttaaacttttagcgacctcagtgcctattgtgggggtctgcatgtaatttatttttaatgaattcggagaaagactggaatgtagcagtttgaaagagctctggagttaagctgcttaggtttaaatctctgcatagcgtttatgcgttctacwccttattttcctcttatggaaagagataataattgtccctgagtcctgaaaattaaatgaggtaatggaagtaagatatttagaacagyggctcatagtctacaaatgttagctgctattgtttctcttgctgattatattatttgcagcagctccacatagaagaggtgcagaataaacaaggtgtttgactgtttcttattaggttgctgaagtacactgatgtggttatttattttttgagacagggtctagctctgtcacccagactggagctcagtgatgtgatctcagatgactacaacctccatctcccaggctcaagcaatcctcctgcctcggcctccagagcagctgaaactataggcgtgcaccaccacactctataattttttaagttttttgtgaagatgagtctcactgtattgcccaggctggtctcaaactcctggactcaagcagtcctcctccttcggcatcccaaaatgctgggattacaggcataagcctggtagatgttgttataataaatacttattttttgagtaggttcttgctttgtcacccatgattgtactgacacagtcatggcttgccgttgcagtgatttctgttgtcctcacatatcctttactttttagcggtatgaccaatctgctcctctttgagttccatattctttccataggtctgttggtctattgattgggtatacattaatgatactttgtgtgctagtcaagagaaaattcaaagatgaaaagagaacctgctgcccaggttagaggatttcagtttagtcctgtgaggtctgatatggtagctaccagccacttttggctctgagcacttgaactttgtctggtccaaattgagatgtgctataagtgtaaaatacataccaattttgaagaaccaaaaagaatgcaaaatatctcaatatgtttttatattgattatatgttgataatatttggggcataataggttaaagtgaaatatttcatctatttttatgyttaacgtggccacaaaaagaaattttaaattaaacatgtgactcacattatgtttctgttggacagccctgctccaatggttaaaacaaataattttagcaataggatagttggtagtaaggtaagtaaagaactataagaaaacaggaagttacgtaactgagaaggttaaggaagatatcttgcatgaggtgatatttcagccaagtcctgaaagatgtgttccctaggcagaggagctggggatggggcagaattataatagcatcccagaaaagctcgttgataagaacatgaactttgaagtaagaaattccttttgaatctcaactctactaatcggtgactrtgtcctggactatttagagaggttatcgtgacatctctaaataatgtttcatcagctctaaaatgataaccacttcgttaagtttttctgacgattaagtagcataatatttataaagaggttagaatagaagcacattacaaagtgctcaataaatgttaactttaacaagtgaaagtaagaaagtagtcgtttggaaattagtttttgtgtttttttgtttttttgagatggagtcttgctctgtcacccaggctggagtgcactggcgcgatcttggctcactgcaacctccgcctcgtgggttcaagcgattctcctgcctcagcctccccagtaactgggactacaaacgagcgccaacactcccggctaatttttgtattttcggtagagacagggtttcaccatgttggccaggctggtctcaaactcccgacctcaagtgatccgtccttctcggcctcccaaagtgctgagatttctgtgcccaacctggaaattactgttgatttagaatcaccaaagaggagatgccttctgggcagcgcagtgagatgaaaccagaaagaaggrcgcaccccacatcctgagaaaggcaccaagatatgtgccctgttatttattgttgggccagagggcagggctctgggaggaaatacctggaattgccaatattgggaggattgattatatgaattaggctcatcaacatgaaggaatgttaggcatccattcgaaatgttgtgcattattacgaaaacaaaagatagaataccaaagtgtgtatcctattgtgattggaacatataaaattaagtrtgcatattggtgaactaaaagaagttgatttgttgaggcaggattgtgagtacatgttttactttcatttagtctgtgtgtgtatgtgtaatgaaaacgtaaaatgttttacgctcacattggaaatatttctcttccttagggatggattcgttctgtccgatcccagaaggaagtcttgttcctgcatgtaaatgatgggtcatctttggaaagccttcaggttgttgcagattcaggccttgacagtaggtgagttttgttttttaaaagaattctttgatttttgtttttcacctctagtgcttctcacttccctactccagtgtttacgttggacccctgagtaatcttttgaaacagatctgctttaatagctttgaggatcaactccgaatatttggaatcaagatccttcaagctcaggcctttcctcctctatttgacattgtcacatgctgatatcccctacttatgcttcacttcagtctttcttaattacctgcggctcccttaagctgttctgctctttcctaatagcatttgtacatgttgctgcctctgcccaatacagcctcttctcctcttgtctttcatagttcctgcttagttaggcatcatctgatgttcccatcccatgattatgtcaggtaccccttttttgtgctcccatagtgtcccgtgcctacatctgtcttaaaatgtatcacattgaatggtaatcaactgtattcctatttgaatcctcctgctagactcttaatytcctgaggttaggaatggcatctcactcttttttgtattcttggcctctagcatagtgctgacaatatgacaaattattgcctgttgaataaatggaagaaactttatggtctcattcatcaggttttaaaactaacactaggtcaggcgtggtggctcacgcctgtagtcctagcactttgggaggccgagacagacggatcacttgagtcaagttaagaccagtctagatatattaaaaccccgtctctaccaaaaatataaaaatgagtttgtcatggtgatgtgcaccaataatctccactactcgggcggttgaggctagagcatctcttgagccctggaggtcaaggctgtggtgagccaagatcttgccactgcagtccagcctgtgtgatagagccctgtctccaaaaaaccccccaaaccaaaaactaacaccattttaatgttaggtatcagctctgaggaagagaacattattctaatttgttagagtgctttgctattccggggattgttagggttaatgctgtttacacattgaataggttcatggatcagagactatgtggttaactgggcagaacaaaaaaaaattgttctgatgtaatagtaacttttttttttcctggagagagtctgactctgtcgctcaggctggaatgtagtggcatgatctcggttcactgcaacctctgcctcatgagttcgggcaattctcgtgcctcagtctcccaagtagttgggattacaggtgtgcgacaccacactggactaattttttgtatttttagtagagacagaattttaccatgttggccaggctggtctcgaactcctgacctcaagtgatctgcctgcctcagcctcccaaggtgctgggattacaggcatgagccaccacacctggccctaatattaatggtaaccttttaaacaactttgtaattgttttgattatatcagtatagcaatcacatgggtctaatgggacctagattttagatttctgtaggatgactgtctctttgagatattcccaggaaaccttaggatatacttatattcatatatgtcaggtagtacatattttaagtcagagcatctcaaattaccctctcaggttgatgaaagtataccagatttccccacccataatgcaatagtggacaatcttatttatataaattatataagaatagcatatatttagcaagcaaacaaaactggatggagaatctcctgacttatttacttaaataaaatttattgtattgctatattataatatttcaatagtttattaggaaggcacttattgtcatacttactgtaattatgaaatgttagaactggaacagatgggctgggcgtggtggctcatgcctctaatcccagcactttgggaggccaaggcaggaggattgcttgagcccaggtgttcgagaccagccttgacagcatggtgagacctggtctctttaaagaaaagaaaaaagaattagaacagatgtactatcatttaccagctccttttttgacagatgattcttaaatgagcttagatgactttccatagttgtcatacagttaatctatgggagaacttgaactcgaacctagtcttattaactagaaagtagcaccttatgtgcttagatcaccagtcaactaagtaaaaaaaaatttttttttaattgcaaaaataggacagagaattcccggcaaattttattttgatttgcagttttcccatgtattctgtaatcttttaaaaagtgttttggccaactaactttttaataagggcaattgtacaacctcttaattctgaattaattatacaaattcttaactctattcccattttaaagcttatggaattcattttataactttatgctctatttatacgacagattatccatagattctgaagattatttaacccaataagggtaaaagcttttgtcattaagtattttaatattcttattgcaaagttgatattaaaatgaaggttgtatataatgatatcttgtttatcttgttttttgttactatagagaattaamttttgggagttctgtggaagtacaagggcagctgataaaaagtccatccaaaaggcaaaatgtggaactgaaggcagaaaaaattaaagttattggaaattgtgatgccaaggtatgatttctgacacttttgtggaggctgtttaggctttaattaagacagcaatctgttttaagtgtgattattaggaagatgaaacttagaatatatttcatttgtgacagataattgaaacaagccatatgacctgtagaggcagtagcaaaaattatttatgtacatagcttagtgagaggtaagtgttgatttttgcatctctgtggtgtgtgtcacagttaaaacttgctgcttttacaagcatgcccagtcagccaccatgatataccagggtgggctcattcttaggaaagccaagaatgacttttgcatgatgtagaaccgatcatccaataatggtaggctctagccacctttggctgtttggtattaaatccattaaaattcattaaaaaaatccagttcctcagtggcattacccacatttcaagtgctcagtagttgcatgtggctactggctactatattggatagcacagaatatttccatttatcacagaaagttctgttgggtgatgccgatcagtagtattgtaaggcttaggccgaatagaggcaagaaattctgtattaagacatgtttatgcctgtttttgcaagactcttctgttagcttcatatatataagcttgataaagaggttagagagaataaaagattattaatcaaattctttaaatttacaatggagaaaatgaggcccagccagatgaagtgatttgcttaacattatgagctgatgtggcacagctgaaatttatattctagccatttgaatcctctgtgtttttgctacacctgtcttcaaatatttaatgaacaaaaatgaggaaatataggaaaattgcatcattttaattcattgtgtattctttcagtgtaataggaagaaatgtaaggaaataaaagaagaaaatgcaatttttattaaaatgtcatccttaatttccaagaaattctaattgatgtaaaatcagaaatcaggttctaagatttctgagaaatagagtgtagaataatttggaaatcaagagcgtaatatagacggtaaccatttttctttttgttttttttagagggatctgtgattactaaaaatttgccatgtgtttcactgtagtagttcaaccttgtctgtggttttgcttttcacggtttgttgcccacggtgaactatggtctcaaaatactacatggaaaattctagaaataattcttaaattttaaattgcatgccattctcattgtgtcatggaatcttgagccgtcctgctccatcctgcctagaatgtgaatcatccttttgtcctgcttatctgtactttatacactacctggccattgttgtggaagaaaaaacataatgtttatatggtttgatactgtccgtggttttaggcgtccactgggggtcttggaacatatcccctgtgggtaagtgggggactactatattcttaaattgttcttccttggcttctgttggtgttgatggcttcatcttccctgaagccctctgattcagtatcattttgaagtattccatcattagggaattctgacccctagaattatgatatggtcacattttcacttttagtaagtatagtgcttgtttctatacgacataaaagtttgtatttgtacaagacttaaaaagaatggatgagactgaaagaaacaggctgccagtgtagctcttttttagcttctctgttatctttttaattaaaactttgatttttgtctgaaaggatgtgtctgtcttaatcttgtaacatgaatgtgagcagtgtagacatatttcaatgtggagccataattttctttcaaattttttgtaaatctttactactctgctagatggaagtagcacgttgataatagtaatgaattgcaccaattgattatgaatgatatgggctttcaagacatayaggtaattttaaaattgaacaccagccttgwgtgtacatctttaatatctacaatattttgaactcctgtgtgccaaacagtggatattttgcataattaatcctaacctatttgtaggaagtggttcacagctaatggatacaaacttgataaataacagatgagcttcagtgatattagctcagttacttggctaataagtagttgagctagattcaaacctacatgtctctgattcygtcctaccattccacttacctggtggaaataatgtggattaaaatcagttatattaagaaataaagaaggaaaggatcttagtttggttccaaagcgctatttaagaaataccctggaaactgattttattaaacagtatctcttttgacttctaatttgttcttttcatttattggcaggatttccccatcaaatataaagagaggcatcctctggagtayctgcgacaatatcctcactttaggtgtaggactaacgttctgggttctatattgaggattcgcagtgaagcgacagctgctattcattctttctttaaggtaagatcctaaaagttccctcttgaccctttaaacagttttaataactgtttaaaaacagttgtgtctttttctcctgatgttaacatgtctgtwagttatgggttagttttgattggtctcttcattatgggttatggtttcttgactctacatgacctagctttgggtgccagacattgtgaattttaccttgttgggtgttgtgggtttgcacacagctattgatatcgctttgatcctttgaggtcttgcttatgtgatttgttaagcaggtctgtagcagtgctcaktctagtactatttattcctcactgaggcaaagccttcctcaggtcccgacctacagccttgagaatgatgagtttttctagtttgtggaacaggtattgtttccagccagcatgtgagcactgggcactgttttctctaatctttttagatggttctttccctagcattggatagtttcctcacacaaatgcactgatctacctaatactacaaggtggccctctgcagctctctctctgatattctagcgtatgaactctagccacttgggtctctccagactctgagttgtgtctcttcaactcagggagtctgctgggctctaccttactttttccccttccctgtgctgtggcctgaaagatctcaaggtagtaagctggtctactggtaggggtttaccatgtttgtttcccatctcagagagagatggcttttgttgttgtcttgaaaactattgtttcatggggtttgctttttattgttactgtttttgttgttgttttacagtgtttttggtttcctgtttctccatcttggtcatagatctatattttgtgtaaagtaagcactaattttaaagagttactggtgttgatcaagtaggtctatctaatgactaaggacattttgtctcatttagctttgcttctcaaccatttccctctacctgggaaagccacagtttaatgtggttgacaagttgctaaggtgaagggaccttctctccctgtggatgggagggccccaaagacaaggagtgatccagcagataaagtttattgttattccacgtggttttgtgaggcttcctgtggtacttctccagatccacctaatttgcagaggttgtgtaatagtggttatagacttcccttgggctgtatccaaattcacacagccccagtctcaccaagaaggttcttgccccttgaaaaagctccttcagattaacttttggtcaaagagctaaagaacatcatggctttaaggcatatgcttttgataagacaaaggaaaataaatcaaattatataatgttatcccattatagtttgtaggggtccagttacacatgctgtcagaaactttgctatgcagcttccatgtggattttcagtagtgcttgaaccacacaatcgtaaaaatacctttttgttttttaaccacatggcttcaacagctgataaattattagttctgaaggttttgtaggcttttggccactaggtggtggtattgacaagtagactacactatacattgattacttgaaacttttagagatatgtaaacaattaaaaagtaagacaagctaaaaaaaaattgaaataaaaaaataaagtagtcagggtgcagtggttcacatctgtaatcccagcacttggggaggctgaggcaggaggatcttttgagcccaggagttggagaccagcctaggcaacatagtgagacttggtctctagtaaaaataattagccaggcatggtggcatgtgcctatagtcccacctactcaggaagctgaggcaggaggatcacttgagcccaggaggtggaggctgcagtgatccgtgtttgtgccactgaactccagcctgggcaggagagtgagatcctgtcttaaaaatattattattactgggcacagtggctcacacctgtaatcctagcactttgggaggccaaggcaggcggattgcctgagttcaggagttcaagaccagccctggcaacacggtgaaaccctgtctttactaaaatacaaaaaaattagctgggtatggtggcgtgtgcctgtagttccagctactcgggaggctgaggtagaattgcttgaacccgggaggcggaggttgcagtgagtagagactgcgccactgcactccagcctgggcaacagagcgagattccatctcaataataataataataataataataataataatactgtgtgtgtgtatacatatatatatatatatatttttttttttttttttttttttgatacagagttcactctgttgcccaggctggagtgcagtggcatgatcttggctcactgcaacctccgcctcctgggttcaagggattctcctcccacaacctcccaggtagctaggactacaggtgcgtgccaccacacccagctaatttttgtatttttagtagagacggggtttcactatgttggccaggctggtctaactcctgacctcaggtgatccaaccacctcagcctcccaaagtgctgggattgcgggcgtgagccaccaaccctggccaaaaattactaaaatgaaatttgaaaaacattcatggccgggcgctgtggctcactcctgaaatctcagcactttgggaggccgaggcaggcagatcacgaggtcaagagatcgagaccatcctggccaacatggtgataccccgtgtctactaaaaatacaaaaattagctgggcgtggtgttgcgtgcctgtagtcccagctacttgggaggttgaggcaggagaatcacttgaatccgggaggcggaggttgcagtgaaccgagattgcgccactgcactccaacctggcgacagagtaagactctgtctcaaaaaaaaaaaaaaaaaaaaattcaagtggttggaaataacttgaattttagcaccattcgtgatagagtagttacaaaaatagacactttttgagtagtaataaattcacttagtatttgtaaagacctggagaatataattctgttacctacctttatgtgtgatagttatctacctttatgtgtgatacttaggattagttgtttaaagaaccctttctgtagtactataaggcatattaagtaatagttatatgttacctagtattttgtagtgtttctttgatctgttactttgggtttgctaaaagatgttaagcctccaaataaaaatttttcgtaagtttcagttttgttaattaaaatatagaaatgtgggggaaaaatggaaacttgaacagtacttttaagacactttaaggatctaaggttatttcttggtttgagtatgaaaaatattttttgtataaccttgtttgctcataaaactgacatacttgttatgtactaaaacttggctatttagaatcctcaaggaatgagtcattcagtaaagccaagtttctgaaataactgaggaattttctctttaggcaccaattttttctaaattccagtggaagtgttcctaaaatgaattacttactttcccctcttcctcagtgagccagtagaaaagattctgctctttctttctcagtgagtcgaggttcttcctgtgagtatcagggattgttcttctctgtatggcagcgttttcaaagcctgccactgactatgtgaagtatttttgttgttgttgttttgagatgaagtctcatactgttgtccgggctggagtgcagtggtgcagtcatggcttactgccaccttaatcccccaggcccaattgatcctcctacctcagcctcccaagtagctgggactataggcatgcaccactgtgcctggctcgttttttttaatgtattttttgtagagatgggatctcactgtgttgcctaagctggtcttgaactcctaggcccaagcaatcctgcctggaccaaccaaagtgctagggtccagatatgagccactgtgccccagcctatgtggagtattctttacctttgtgtagaatgtctccaaattgctatgcctttgagttcctgtgactgctgtttatgttttttgttttttgttttttgttttttgttttttgacagagtctcgccgtgtcacccaggctagagcacagtggcgtgatctcggctcactgcaacctctgcctcagcctcctgagtatctgggactacaggtgtgcactaccacaccgggctaatttttgtattttttagtagaaactgggttttaccatgttggtcaggctagtctcaaactcctgacctcaggtgattcacccgcctcagcctcccaaagtgctgggattacaggcgtgagacactgctcctggcctctttatggaattttaaaatctgttcttgctgtcactttatgttgtctatggcctgcctgtggctagcaattcctttcacgtttccttttttgttgattctgattaaataatagttatttcagtttcacgtgaaagaaaaagataatctattagtcttctcttactgatgtgtatgggccgtaatgtatgaactttataattttgggatactcagagccttataaaatatctggttttagaatgtgtattaaaatatttaaatacttggaggtgatgggtggaatctgaaaaattgggtgaaagtgtttgcttttatttttggcctcttttctggccttcatgtttctacttargagcccctttgctgcgggacagtataaataagtgacactggaaacctatttgaggcacatactgacaatacttaaccactccttgctatttactttccttttattctttttactcccccacccgctttcacttttttggactttgtttgcacggctgtattattcttcctttgtactctctcctttattagcatttggtaacgttaggaactttgataagccttgctagcagttttaaagcagygaaagctgctgggcccttttgtaatgtttagcattagttaagtattaaaaataattcccactaggtgtgtgatttaaaaaaaaatctcagttattttcctaagatttacagtgctgtttcttgtggcatttgaccagttctaacttgggcaatcatgtttagccgttaaattttctcctccctctccacctccccttccccaccctcgtttcctttggatttttcacttcctttctttgtttactgcactcatgttcatagttgcctacgttcatgtggaagaaatgtttcatgtccatgattcttggctcctaggagataaaaattttatgcagtaatgttattgatcagattttattggttttctataatgtgctctgtgcagcacctctgggcatgttgctgtcagattaagtgtacattttaatactttctgagactgctaatttagagcttgaatatttaatcagtccacatcataaggcaagttgttgactgaatactttgtattatagccagaatacttgaatttgagaaggatcatattcgggaggtccctagtaatgcatagagacaatctacactccaccaaacttggcagagatatgtatgtaagaatttattgtattgattccaagaccaaaattttgcattaagcatgtactatcctacatttctattataaattcacttttcgttacctgcagtcccaccctgcaaacatctacattgtgtgtaaccttttgcttacatccatagtcaaaatgaaagaagcataaccttgaagttgctgactagcaacagcttttgtggttcactaatggaaatagtctcagacttttgttcggaagagctccatttggggacctcggtaatggatggatttgctgctgctcagaatattccttcaggcaaaggaagtacactgcctgtgccatgtggagtccattgtgccatcagtttaatgacagagacctcctaaagatcatttctgcctttttttgctgtttgtttattcagtctctatttgtctactttttctccttttttggtggttcattacaattgaggtcatatttcaagataagtttatactgatcgctttgtattcctctagcaacgtgggcagcatcattatgcattagcctatagtgtgcgtatgtgtttgttaaatcaccaccaaaatgttagagaaatgggaagagaatatagtactaaagagagagcatgaagacctaggttctagtcctggctcagccactgactaattgtgtaacttgtggaaagtcactaaatctgtctgggccttaacttccttatctttgaaatgaagatgttggactagttaatgtctaagtgtgttcctgaattaaaattatttgtgcccctgtgggtagttaaaacactcaactgattttcagtagtcttaatatttaggggattagggagggatttgatacagcatctgcttagtgtgccattttaatactataagaggatgtgtgttcttggaattgttgaatgtgcaaatatcctgaaaacagtggttttctttttcaggacagtggctttgtacatattcatactccaataatcacatccaatgactctgagggagctggagaactttttcaacttgaagtaagttttgcttcccatyttgaggggtacattgctgtttaatatttttcatttgagggtttgaaatttaataatagttttgtggacagaagactatgagcagcacctgaaattgtcaataaaaatccttgaaaaacttacatagacaattcaaaccagtctcatttcctgtagtaccagcagtcttatgctgtgacaggtaagaatgaatttttttttttttttttttttttttttttgagatggagtctcactctgtggccaggctggagtgcagtggtgcgatctcgactcactgcaacctccgcctctagggttcaagcgattctcctgcctcggcctcccgagtagctggtactacaggtgcctgccaccaggcccagctaatttttgtatttttagtagagacggggtttctctttgttagccaggatggtttcgatctcttgaccttgtaatccacctgccttggcctaccagagtgctgggattacaggtgtgagccaccatgcctggccaagagtgaatttttaatttagcactctatttacttttcttaagttactctgaattgctgaactagagaaatttgaagaggcaagtgaggattttaagctctctcttatgcagattcaatccacagttaatatttgtggacgtaagtcatattttaaaatataaataaaaatagaagagtatacatgtgaatatcattttctttttcaaagtctttaaaaaatacattttttcataagaactgatttatattttgttcatcccatgaaggctcttaaatttgtctagcaatcattttttgagttcctagtatatgccaggcattgtcagcctgcccttactgcagatattttttaagttatcagtttttcttattggaggcagtcgaaagccttgcatttaccagtttgatagctatttaaaatcattagccggttgtataataatggacagagagaatggtatgatcatgagtggtactttggtacttcttttatttgtttactgatttctttatctttaagatgtcaggattcttgtttatatatttggttgattctatcaaatgacaaaatttgtatgtaactgctttctccggttcagtgctttttgactcttaataatggtggtggtgctttatattattgaacaaagtagtctctgggagaagttgtcctgataggttgaagtcattcagaatgataatcaaatgccgtcttcattatacatgactggaagaattcttgacgttgatcagcattctgcaaaaaagcagaataaaaatgccttgttgaacatttagagtgggggtattagcatctgtgtatatgagttcaaagaaggcagcaggtracaaaataaccatatgtaaattctggaaaacattctcttctaggtgtttattttctctttgcactttaattttctgcatagtgaagccaagaattactgtaaatacatttctaaatcccttagtctaaaccactgaatattcaataaatggctgggaaaaaaaggtataatttaaaggagtctttacaaataaaaaggaattgttaaagagacccaaatgaaacaagtaaaaaagtttttaatgtgcataaataaagatacatttggagataactgcattgctaccagggaaatcccataagcagctctgagtgattgtatatatataaaatataagagakatatatatatataatataagatatatatgatatatatacatattttatatatatatcttgacctctaaataacctaagacaaattatcagataagtgtgaataaataggaagaggaaaaaaatgtatttctgaagctaaacaaatgagaagtgtactatgttcatattatttcagagccagggaaaggaatttgtgggattgaatttgcccatgcagaatatcagaaagagaaactcttgaattcattgatcctaggctcctacagtcaggatctagctcaggtttcagctgatctgtgctatctggcttttatgctgtgtcgacctactgtctttgttgctttcagaagttygactacaaagacttgtcttctgtccctgccaaccctctatcctttgaaagcagagctccttcttatcccacctcacatacttcacttccaagattcattgtgttgaattcctcctggctgcctgtagaagcataagaatttgaattttggtaccccttttaggaggaggtgggctttcatatttaaattcttgcttctcgtaatggtgcacattttttctctgacagaaatgaagtgtcattaagtactgcatttaaagataagagggcagctttaagaggtcaccttgaaaaaacacagtaagaacatgcacttctaatattctgttgagaagtgaatgcatgctctatcattttactcttcctttccctcatctccatttcctactttgatatttgttaaggtttggggactactgaatacattgtaagaagtttccttcaaggcatttgttcgttattaacggacatttggtgccatctgtgttcaagatgctatgctgtaaagatgtagttgaggttctatcctgtcaagccggtaagttggcaggagttgataagggaaggagcatgcttttcattcactgttgatgttacttatcctacaaaattccttgtttgtacacgttttcctctttgtcctaaggccctggctgagttcccaaaattaggtttggtctttataatttggaagaattagtttgtctttgaggagataaaagagattaaggcaagaattgtaggttgtggctgtcaaagacaaaattactacaaatttagtttaaagatcttaattgactttcatttgccattcaagaatcaggcaacacttccttctataaaatagaagaggctagttttatagatggaaaaaggctgaggaaagcagaaacaaaaatcaaaaagcaattgatctttacaaagttatttttcttgtaaaggttaaagcaaaggggacttccttatgctggctaaaattgttctctttggtgatgtggctgttactcctcttctgacttctcagaaggtaacgtgaagatcttagttttggcttggtggcgatgcacaactgtatacagttccatggttttcagtataactagaagttgatgggaaataaggtggaattgctttatgtatacatttgaggatatagtgttaccagttataagtggtatggaatctagaggaaaatgaggtaggtcagtgagtactgacttggtcagaaaaaccttcaaaatgaatatgtgacctgactgtaccttagggagaatattccaggtaagagcaataatgtaagaagaatcagataattaaaatgaggcatagacaatatacattcttcttgtcttcacgtggcacctactctaaaaccaaccacataattggatataaaacaatcttcaacaaatgtaaaagaactgaaagcataccaaacacactctcagaccacagcacaataaaatagaagtcaacacaaaagcattcaaaatcatatgattacagggaaactaaacaacatgctcctgaataacctttgggtaaataatgaatttaagacagacatcaaaaagttttttgaaaataatgagaacaaagatgcaacgtaccagaatctctgggacacaagtaaggcagtgttcagagggaaaatcatagcactaaacgcccacatcaaaaagttagaaagttctcagattaacaacctaacttcacaacggaaataattagagaagcaagaacagatcaaccccaaagctagcaaaagatgagaaataacaaaaatcagagctgaactgaaggaagctgagacacaaaaaaacattcaaaatatcagcaaatccaggagttagttttttgaaaaaattgatgataggccaccagctagactaattaggaagagagaagatcaaataaacacaactggaaatgacaaagggaatgttactactgactccagagtagtaaacaaccatcagaaactactacgaacacctctaaattgctggaaacatacaccctctgaagactgagccaggaaaacattgattctctgaacagaccaataacaaaactctaaaactgaataaataataaatagtctaccaaccaaaaaagcccaggacctgatggattcatagctgagttctaccagatgtacaatgaagagctggtgccattccaacagtaacttccaaaaaattatggagggggaacttctcctcaactcattctgtgaggccagcatcatcttgataccaaaacctgggagagacacaacaaaaaaagaaaatatcaggctagtaaccttgatgaacattgatgcagaaatcctcaacaaaatacttgcaaactgaatccagcagcacatcagaaatttaatccaccatgaagtaggcttcattgctgggatgcaaggttgcttcagcatacaaaaatcaatcacagtgattcatcacataaatagaactaatgcagtaaaggcttttgatataattcaacatctcatgttaaaaactctcaataaactagatattgaaggaacatacctgtaaataataagagccatctatgacaaacccacagccaacattataccaaatgggcaaaagctggaagcattccccttggaaaccagcagaagactataggatgccctcaccacttctcttcaacatagtattggaagtcctagccacagcagtcaggcaagataaataaaggacatctaaataggaagagaggaagtcaaactatgtctgtttgcagacaacatgattctatatctagagaatgccatagcctcagcccaaaagctccttcagctgataaataacttgagcaaagttgcaggataccaaatcagtatagaaaaatcactaacattcctatacaccaacaacaaccaaactgagagccaaagcagaaagtcagtcccattcacagttgacacacacacacacacacacacacacacacacacacamgcacacacgcctaggaatacagctaaccagggaggtgaaagagctctacatgagaattataaaacactgctcaaagaaatcagagaagatacaaacaaatggaaaaatatcccatgctcatgggtaggaagaatcaatatcattaaaatgggtatactacccaaagcaaattacagattcaatgttgttcatatcaaactatcaacaacattcctcacagaactagaaaaaattattttaacatttatatggaacagagcccagatagccaagatagcccagatagccaagagcccagatagccaaggcaatcctaagcaaaaagaacaaagctggaagaatcacgttacccaactatactacaaggctccactcccaaaacagtgtggtactggtacaaaaacaggcacatagaccaatggaacaaaataaagagtccagaaataaggccgcacatctatgacaatctgatcctccccaaagctgacaaaaacaagcaatgaggaaaagactccctatttaataaatggtgctgggacaactggctagccgtatgcagacgattgaagctggacctcttccttacatcatgtacaaaaatcaactcaagatggattaaagaggcttaaatgtaaaacccaaaactgtaaaaaccctggaagacaacctaggcaataccatcctggcagagatttcatgacagacatcaaaagcaattacaacaaaagcaaaaattgacaaattggatctaattaaacttaagagcttctgcatagcaaaagaaactgtcagcagaataaacagcctacagaatggaagaaaatatttgcaaattatgcatctgataaaggtctaatatccaggatctataaggaacttacttagaagagaaaaacaaccccattaaaaagtgggcaaatggctaggcatggtggttcatgcctataatcccagcactttgggaggccgagktggatggatcacttgaggtcaggagttcgagaccagcctggccaacatggtgaaaccctttctctactaaaaatacaaacgttagccgggcatggtggcacatgcctgtaatcccagctactcaggaggctgaggcagaagaatcgcttgaacccgggaggcgcaggttgcagtgagctgaaatcatgccactgcactctagcctaggtaacagagcgagattttgtctcaaaaaagaaaaaaaaagggggggtgcaaaggacatgaacagacacttgttagaagacatgcttgaggccaacaagcatatgaaaaaaagctcaatatcactgatcattagagaaatgcaaaccaaaaccacaatgagataccatctcacagcagtcagtggcgataattaaaaaataaaaaaataacagtgctggccaggttacagagaaaagggaaacccttatatgctgttggagggagtataaattagctcaaccattgtggaaagcagtatggtgatttctgaaagagctaaaagcagaactaccatttgacctggcagtcccattactgggtatatacccggaggaatataaagcattttatcattgtgaagcccaaatattgtgaactccaaaattgacaagtctcagtcaatttaggaagttgattttcccaaagttgaggatgcgtgcctgtgacacagcctcaggaggccctgatgacatgtgcccaaggtggtccragtgcagcttggttttatacattttagggagacatgagacatcaatccatatacgtaagatgaacattggttcgatccagaaagatgggagaactcgaagtggggagggggcttccaggtcataggtagataagagactagtggttgcattcttactgagtttctgattagcctcaccaaaggaggcaatcaaatatgcatttatctcagtgagcagagggatgactttgaatagaatgagaggaagtttgcccaagcagttcccggcttgacttttccctttagcttagtgattttggggcccaagatgcattttcctttcacaccataaagacacatgcacgtgaatgttcattgcctcactgttcacaatagcaaagatacggagtcaacctaagtgcccatcagtgacagactggataaagaaaatatggtacacatacaccgtagaatattatgcagccataaaaaggaatgagatcatgtcttgggggaacgtggatggaactggaggcyatcatccttagcaaactaatgcaggaacagaaaactaaataccgcatgttctcacttgtaagtgggagctaaatgataagaacttatgaacacaaagaaagaaacaacagacactggtgtcttcctgaggggggaggatgggaggagggagaagagcggaaaagataactgttgggtactgagcttaatacctgggttatgtartatgtacaacaaactcccatgacacgtgtttatgtaacagaccttcacatgtatccccaaacctaaaatataaaatgaatgtaggggtttttattagactctgggtggagagatacatgagaaggttcgtattggtgaatcataggaaataaagttggatagctttaggaatgagatggagcagggttgtttttggtgggttttttttgtttgttttttgtttttttttgagacaaagtctcgctcttgttccccaggctggagtacaatggcgcaatcttggctcactgcaacctccacctcccaggttaaagcaattctcctgcctcagcctcccaaatagctgggattacaggcgcctgccaccacgcccggctaatttttgtatttttagtagagacgggatttcaccatcttgaccaggctggtctcaaactcctgacctcaggtgatccgtccgccttggcctcccaaagtgctgggattacaggcatgagccaccgcgcccggcctggagcagggtttttaaaaaactattttattggaacatatctcacataccataaaatatgaaagtgtagtcatgtgccgcatagcaacattgcagtcagtgacacatcacatataccatggtgatcccataagattataatactgtatttttactgtaccaattccatatttagatatgtttacatacacacacgcttaccattgtgttacaattgccaaagtattcagtagtatcagtaacatgttatacaggtttgtagcctgggggtagtaggctataccccgtctgygtaaatagactccgtgatgttcgcacaacagtgaaattacctagtgatgcatttctcagaaygtgtctgcctcaggctaygcacaactgtataaagttgcatggttttcagtatgttctcagggttgtacagccaatcaccacggtctaatttgaggacatttttatcaccccaaaaataaactgtacccagtagcagccccttgccattcccacccttagctctaggtaaccacaaatctgctttctgtggatttgcctcttctgaaacttttcatataaatggaatcgtacaatgtatggtcttttgtgtttggcttctttcacttataaagtattgtagtatgtatcagtacttcattcctttttatatcaagctggtcccttttgtggatgtatcatgttttgtttattgatttatcacttgatggacattcgtattgtttctacataacctttaacctgtttcactatgaaaaatgctgctatgaacatttttgaaaagtttttgtgtggatgaatttatgatttaatttctcttgggtagaatttctgggtcatgttgtaaaccttaagttcaacatttttaaaaactgccaagctatttttcggagtggccgcggcattttgaggcttctcctttccctgcatcctagcctacatttgttattttcagtttctttgattataatcatactaatgggtgtaaagtggcatattattgtggctttgatttgcattttcctaatgactatcaaaagacaaaattacaacaaattttttaaaatttaaatttcttcatttaacaattctagaatgggctaacgcttcattctgtaaaatagaatgtattctgatgagctgacctgaggttttatagacagaaaatgactgaaggaaatataaacaaagaacaagaagtgtattggtcactttaaagttactttccttgtaaggcgcaaggtgggaacagtgaaacagaacaatagaaagtaactgattggttaacattaggtcacttcaggttacattttgttggaaggattaaaggtcgagggaactttgttatcatgctgattaaaagtggcctgcttgagaaattcagccatctccctctcctgatttctaggaatgccagataactcagtttcagtttgatggtatggaactttagtgtgagtgactccattactgcactatgcctagtgcagtagcttagcccaaaacaatgccttatttaacatgactaaggatgttggacgtcttttatgtacatattgaccatttatttctcttctttggaaaaatgtctatttaagtcttttgccttaaaagactttaattgggttgtctttttgttgttgggcctgtaggaggtattttatrtattctagatacaagtcttgcccctctcctccctcccaccccctaccagtgtgaagcctctgatgctgccactcagggggaatagccttgagtatgcccacaataaggatggcactggttttggtagagctttctttggctgtcttttcccctgaccacacccacctcttaagctccattacttgcagactgattgtgctattgttttcaaagtctggggcataaattgtttcacaaacygatccaatcaaatttatactcctttgtggacatagttttcaagggcagcgtttgagtttgttctgaccccaaaaaggctcttcccagctgtttctgtttctttccagcatactaggaaatctacagtttagcctttatcaccagtgactctttcaatctgcctttcatcacaaccaccactattctggagagcaccgttcagtttggacttttacatactttgttgcaatgaagtcagttcctttgggtaaagatttggagctctgttttatggcctgcttctttgcccagtcagtgttggagtcaggctccagtgctggcggaagggacaatggatcattctcactacaagacctcctgatttaggagctgagtgttcagtggagcaagaggcagcagcccaggtttcttggcttgtctctcctggcatggaacccccaccccaggatctggggcaaaagctgtcaggaccctagtgttctcagcagcaccatgcccaaggtggagcctccatcccccaagtgggactggggctgargaagggaggctccacctctcagccacacttgcccagaacttagcctcagctacaggtggctgtgagaaaggggagaaatgcctgcatgctgcccctcttgctagagccctgtgatcttggctctaattggggggtagagtttctgtcttgccaagctgtgaggggaaaggaggaagagggctctgtttcagacattacagactctccttgtcctcaccgagctttagtagatttttttgaatagatgtttcttcatttgctgtatacccttaagacgatttctagagactttaaatggttggattaaaaaaaaatttttttttaaataacatttacgcatttcactgaggaatgggtctgaggagctccccacactgtcatgtcagaagggaggaggaaaaacaggttagccacctcttggctactttttaccaccacgatcctcaatttcctctcttgtaaaatgtgaagaacactattcttatcggttgtaaggattagtgaaatgacatatatgaaaacttcatattgctaatccaaaataggtaaaacagtgtgcagaagcaggctgatgtaagcactagcatttctcttctctaaactgttgtgcattctagaaatggtaacacaaagttactagacctcagaaattctggtgcttatacatttttatgactaagttgtttatggcacacatcattttggttgtgctagatggtttcactttttgattactcttacctattttcttttaaacgtttttagatggtatgtgggctaacccaggtcaaacctcttctcaaaacaacttttttctagctaatattaatacctcccttgttccaactcctgttaaacttgtattcagttgctatagctggttttattttttgtttttgagtcacagttttgctgtcacccaggctggagtgcatgcacttgcactgtcatcgctcagtgcaacgtccaactcctgggctcaagcagtcctcccacctcagcctcctgtgtagctgggactgcaggcacacaccaccacacctggctaatttaatttttagtagagacaaggtcattatgttgcctaggctggtctcaaactcttggactcaagcgatcctccaatctcagcctgccaaaatgctggaattacaggcgtgaaccaccgtgcctggcctactatagcctgttttaacattcagttgttcatcaatgatttcttacttaccagttttggttccctgtgtagatggtaagttccttttagggaagacctgtgtcctccacactacctggaacacttaaatacttattattattttctaacggcaattttagttttgtagaactttcagccttaagactagtctagtcatacgttcataaataacataatgatgttcatgattattagctaccacacccagctaatttttgtgtttttagtagagtcagagttttgccattttggctgatctcaaactcctgacctcaggtgatccgcctgccgtggcctcccaaaatgctgggattacaggcgtgagccaccatgcctggcttatacctgctttgttcattttgttcacgtatcagtacctcttactgcttctgcctcattcttttaaaagtatgtgctgtttcagtgtatcaatatatgtatttcaatgtatttaacctattcttttactgatggagaattcattggctatttttttttcctgttacatgatagtatgcacaagttagtattgggtcctgtgttgagaattttgaattaaaatttgttctttaaattaaaatgagctggttctcaagaaatgaacagtttctgagttctttttttttcttcttttacctcaagtgatcctcccactttagcctcccaggtagctggtagctagtactatgggtgtgcaccaccacacctggctaatttttaaattttttatggatacagggtcttgytatgttgtccaggctgttctctaattcctgggctcaagcagtcctcccsccatggcctcccaaagtgctgagatgacagtcatgagccaccatacccagccacgaaatgtatagtgtttatccagaagataaagctgacacgtgaaatcgtagcagaataattaaatgtttaattggcttttaccttttttaagggtaattatacagaatatacagaattgttgcatcaagtagtgcttcactttttataagtgctctaggagagatttctgacaaggaaaaactaggtacaggagtgatcagagatgtccacaggacaaagcaatgtgtatgatccttgtttatagttccgtctttgatttttgttccaactttgtcattttctacttccaaaattatccagattcataccaggtacctttcagaaaggcaaattggtaagattggggcagagtgacctatagtgagaagcaaggggatatagtgaattattgatgtatatcacttacctaatgcaataatttattccttttrtcaattaatattaattgactacatgacatgtgctggaggaaaagtggtgaacaaagaatctctttccttgttgaatgtatatccttgtagaagaggagacaataaatctaaaagtaaaatagagaatatgttaagtattgtggtaactgtccaaagatagctgcctagtgcactatgcttcccagtcccacatctttctgttgtcctcacccacagttaaagagtgggctggttctgtgtaatcagtaggacatggtggaaatgaaatatccttgcctttgtttttttggaatggctccgggggaagccagcatctgtgtaagaggtactgtgctactgtgagacctcaaactatttgtatgggaaggctgcatggtaagacagagatacctggctacacttcagctgtttcagccatcccagctaaggcaccagacttgtgattaaggaggtcatcttggatatctagctgaatctagccttcacatgactccagtgccggcagccatttgactgaaaccatgtgagagactccatacaagaaccactcagttgaagccaggcaacccatagacttgtgaaagatagcagtagattatcattttaagccgctaaattttagaatgatttgttgctcaccaataggtaatcagaacagatggtkatttgtattgcgaagaaaaataaattgggaaaaaggttagggagagagagattctagtttaaattggatggtcaaggaaagctttactgaaaagatgttcaaaaagcatgagtggaccaggtgcggtggytcayacctgtaatcccagcacgttggkaggccaaggcaggcgtatatatcacttgaggccaggagttcgagaccagcctggccaatacgacagaaccccatctcccatctctactaaaaatacaaaaattagctggccacagtggcatgcacaactgcaatcccagctatttgggaggmtgaggcacaagaattgcttaaatccaggaggtggaggttgcagtgagccgagatcacaccactgcactacagtctgggtgacagagcaagactctgtctcaaaaaaaaaaaaaaaaaaggaaaaagcatgacggacatatgggagtaagtaatgttgatacctgggaaagaacatttcagtcagaaggaacagcaagtacaaagattctgtggctggagcagcctcaggttttcaagaaacaatcatgaaggcaggtatggatcgagcataggaaagagaggaagattagtgggaactgaggttaggcatagaggttgggagtaggtgcaaattatatatgtgagtgatgttcatctttatgaggtgtaacacttttgtaaaaaagaattttcataactccttttctttcccaaatatagataatatgtataatgaaatgtagatgatataaactttttatacacttaattggaaaaatatagtgcttccaacttaatataaaaaagaaagaaaagtaatataatcagtgtattttattatgtaaatactgtggtctagaagaatgtaagtagcctttatatagagatataaagaactgctgactttgacyactataaattaggacttaaacaggtgtgttatattggtgactcacatatcatgaacagtttgctatttgtgatgagaatactggagtgcagtggcgcgatctcacctcactgcaacctctgcctcccgtgttcaagcaattcttctgcctcagcctcctgagtagctgggattacaggtgcccaccaccacgcgcagctaattttctgtatcctttttttttttttttttttttttgkgagacggagtctcgctctatcgcccaggctggagtgcagtggcacgatcttggcttactgcaaactccgyctcccaggttcacgccgttctcctgcctcagcctcccgagtagctgggactacaggcacccaccaccgcgcctggctaattttttgtatttttagtagagacggggtttcaccgtgttagccaggatggtctcgatctcctgacctcaagtgatctgcctgcctcagtctcccaagtgctgggattacaggcatgagctactgcgctcagccggtaactcattcttgataagagttccgcatgaaagtattagctttcccttgatttacatggaagatgcattctggaaaattcagagcatattaaaataatacaatttacctaattcactaacatgaatgttccatkgcatatttgaaacttggggtagtacccactaartttcagtagctctccccagttatgacaaccagaaacattccctctaaaaaggactttttaggccattataagaatattggctgtgagtctttggagagttataagcaaaggagtaataaatcacttatattttaatgagatcattctggctgctatatggagattaaatcagggagaggtacagaagaagagaaaccagttaaaagtctaatgctgtattttaggtggacagatagtgatttacacaggagttgaaattgtacatcctcaaatgtggttggattctggagagtgagagagagttttttttttttttttttttttttttgagacagagtcttactctgttgccaggctagagtgcagtggcacaatcttggctccacctcccgggttcaagcgattctcctgcctcagcctcccgagtagctggkactacaggtgcgcgccaccacgcccagctaatttttgtagttttagtagagacgggttttcaccatgtcggccaggatggtctcaatctcttgacctcgtggtctgcccgccttggcctcccaaagtgctaggattacagccatgagcctctctgcctggccggattctggatatatttagaaagtagcttatgcatcttggatcttggtaccagggtacatgttttttgtttttgttrtatctattcctgctgtgtattttcccagaagtgattatgttgaatagttcacctctgctagacttttgaacttttaatatagagagaattattttttttcctacaartggttatttccattgctaattaaaagtagaaaagtagcgtttcttctttttaaaaaacrtgaactttcatgttgctagtctggacattagaattcaagtaatcataaatgaaaagaaaatgtcagcttcataaacactggaaagttttttgagtttatactctttagggccaataccatctaattattwggggaaattgatttttgttggaaattagacatttattttatgcatgccatctttgaaggaagcattccatggcattgttgacttcaagagacactttgatctcaaaaaatgatgtgaatcccttttggataatctttggatagcatcaaaatcgtgacttttatatgagtatgctttataatggcttattctttttttttgacacgtagttttgctctgttgcccaggctagagtgcagtggcaccatctcagcccactgcaacctctgcctcctgggttcaagcagttcttgtgcctcagcctccctagtggctgggattacaggcacccaccaccgtacttggctaacttactcttgattaccacagccagaggtaaagggcaaccaagcccttctgttccagttatcaataacttaacttcctccttgcagcaactgcaagaaagtatattttgtgggggggtttgttttgacccaaggtctcgctctgtcgccctgttgggagtgcagtgatgagccagcgatcatggctgtctgcagccttgacctcctgagctcaagtgatccacccactccagcctctagagttactaaaactacaggtgcgcaccaccacacccagctaatttttaaagtagagtcagggtctcactatgttgctcaggctggtcttgaactcctggtctcaagcaatcctcctgcctccaccccaccgaagtgctgggatttataagtatttattgagtacctgctgtgtttagtggtagtcaagtcctttgtgtggatacgtggtttggagacttaactctggagcataggtatcccttctcacagaagtcctagttracggactaggaccatatcttatcatattcatccttaaagccccmatctgacaatgaataagccaaaattaatatttttcaagcaatagtgaaaaaaagtttggttcatttttcaccgacccctttacatttaggaataagtttgctgttttgcaattttacatttgtgtttatctcctgtaaaagaaaaataaggcagcattgtatattcactttctgttttgcctcaaccttaccctctaatattagactccacgcgtcttttcttgattcwttctttctcagactgctcagcaggaaaacactgtttacaaacagtctgacttaataacttcctttcctgctgatcaaatagttgtttaaatgaaacctttctcagggctgagtgggtgttctagttagtgggtgttctggaatgtaaatgaacccttattttaagaaagattatttttatactagcagttctgtgtacaccaagatacacatttgtagcaagtggaaagtatggaaacataaactggacttattggaaatttttagattagtgaaagacctacatatatggcttgttaataggcaaatcccaaaactaacataaccggcaaaatagaatgcagtttattgagcctgtttcccttggctttggtttttacgtatgagatgcagtctaatggcatgcagaacaatttctgcagcaatgatagcaactgcatttgagatacagcttgatagggatcatgaaactaccaacccacaaatctttggagactgtatgacagatttagttcctatgattgattgcttggttggttgattgattttagaggcagagtcttactctctcacctaggctggagtgcagtggtatgatcataactcattgacctcaaactcctggactcaagtgatcctcctgcctcagcctcccgagtagctggaattacaggcaccctccactacacctggcttgttttatgttatatgatcagcatttcatacttrggagagactaatattaaaagcattttaatccaaagctttatttcaacactacaggataaaaaatgcgagagctgggcacagtggtatatgcctgtagtcccatcggaaggcagaggtgagaggatcacttgagcccaggagttcaagaccagcctgggcgacatagcaagaccttatctcaaaaaaaaaaaaaaagtgacatgacttattggaaaggtgattgtactagaagctgagaaacctggattctacaactgatcttaccaaaaagtagttgtatataacatttattctaacatttgacatttaacatttttaagctttaacatcttttacaagagggaagttgaattaaaatttttttttttgagatggagtttcactgttgtcactcaggctggagtacaatagtactagtttcagctcacaacaacctctgcctcccagagtcaagcaattctcatgactgagcctcccaagtagctgggaatacaggcgtgcgccaccacgcctggctaatttttgtatttttagtagagatggggtttcaccatgttgaccaggctggtctcgaactcctgacctcaggtgatgcgcctaccttggcctcccaaagtgctgggattacaggcgtgaaaaaattaaagttttatctaacttagatttttttattctttactatctgtatcgtgaaaggcatagcctccctctaatctcttaattgggatcaagaaagaaaataggatattcagtggttatatggagcttacagatggtgagtactctcccttttcttcatgatcttcaaaggaaattgcagattgaggtaaacaggacaatagcatgccattatgattttaaaccttttaaatttctgaaccatgcttcatctttatgtattctcttcccaactttttgtctctgggattatgagtaaatagaactgggtaaaaggtgggggtagggtacaaagtagaaaatggaaaaagtaaaaggagataaaaatagattgggtgtttcagtgattgtagaggtcaaatagttttcccattgttgattatattcctttccactgttcagcttactgctatttactctcgctccttgctatatattttacatggagacagagtcggacttgtgtgggtttttctatttaattctcctgagattgtgaaactgctcagctaaatttgttctgctgtgagaacaaataactggagggcaattcaaaatacttgtttaatattttcttggaaatcctcaaagaaacagggaggattttagatccgtgtggtaagaaattcactgggatacacacattaaaaaattttttttggtagctcttggtttcccctttcttggctgtgctatttactgtcttccagtggcagaataacctagcaaaaatttttgttttgcataatagagaaaggctaggttaagttttattgcactaatgtaagttttatatgatcagggaaaggttagtctatcatggactgtttaggatgggaggtaatcatcctttatattgattttcaaacatttttgttcaaaagtgttttccaaacaaaatcttataccaagaccctctatagaagatagataaaaggaawgactttgtttatcagatagctcaaatccacgtggttttgttgatagactatatgaatgccttaacagagcattgggaacttgggagattgcaggaaaaggcttagttacgcaggactttgtatatattgcaggacatgttggactcctgcccactaaatgctctacagactcctgaagtattttctagggaacactatcatcatcaatgagaagcactaatctgtaatctctcccctggcgattttattcacttccaaggctttatgtaccataccatctacatactgactgccaaactgtttatctgcagtcccaaactgtttatctccaggttctgtttctgagctccagatttgtagaagcatctgcctacttgacatttctcctttgatgtctaatatgcattcaaacatagtatgtattaaataaacctcttgattttttcctccaaagccttttcctcttctttttttatctcagtgaaagttaccatctactcatttgcttaagtaaaaaatctagatgtcagacttaattcatacctcccctgcctgtctccccaaacctcacatctaatttatccrtcctttgttggctcatctttaacataaatcctcaacctctccatttctctgtttccaatgttaccagtttaattcaagctactcttcttgtcttctgattggtgcccctacttctactcttatccctttattatctgttctccgctaagacactagaagaattttttaactcatcatgccacaaccccatgcttacatttcagtggctgctctgtgatcttagaataaaattcaaactccttatcatgatctataaaggacccataatctgatttctgcctacctgtctaacctcatcttttttttttttttttttttttttttttttttgagacggattctcgctctgtcgcccaggctggagtgcagtggcgcgatctcggctcactgcaagctccgcctcccaggttcacgccattctcctgcctcagcctcccgagtagctgggactacaggcgcccgccaccacgcccggctaattttttgtatttttagtagagacggggtttcaccgtgttagccaggatggtctcgatctcctgacctcgtgatccgcccgcctcggcctcccaaagtgctgggattacaggcgtgagccaccgcgcccggcctaacctcatcttttaacagtcttactcttgagtccctcaagctacagtcacctgccttccactctcgtaaggtatgacacccccttcccacgtactgatctctctactggctgttccttgtgcctggagtatttttcccagtttatagtatagcagatacattcttatctttcaggtctctgcttgcttgttactgcttaagagcccttcccataccccagtacccaactcatttatcccagcttgtaattatcttgattctttattagtttacatgttatwttcttttttccccattagaatgtaagctctttgagagcttatgttctcttatttattgctctctctcatgtagcacagtgcttagatgaatgaatgaggtgtatatacagattatcacggaaatgcagagaagggtcatttttactagtctaggcatggagttgggggctattagcagtaagaaggcctcatggataagtgatttttgaggtgaatgtattgtgctgtggtcctaaactgctgtgaggtgaacaacgtaggcagtgtgacatcagtggaccaggtagccaagactgctgctaagtgactataagattggtagcatatagagcatggataccccagacaaaggaatgattcatgtccagggcaggatggagtgggacagcctgagatttcatcatgctactcaacacagtgcagtttaaaacttaagaattctttatttctggaattttccatttaatatttccagactgcagttgactataggcgactgtaaccatgaaaagtaaaactgtggataaggggagactactatgcctacttaaggaatgttttgaataatgtgataattaagtcagacaaacatgtatgtatgtttgcatgtatgtatgtatgtacgtacgtattagggacaagatcttgctctgttgccaaggctgcagtgcagtggtgcaatcacggcttgctgccgccttgaacttctgtgctcaagcaatccttcctcagcctcctcagtagctggaactacaggcacgtgcctccatgcacagctaatttttaaattgcatttttagacatggacctctcactatgttgcccagggctggtctcaaactgctggactcgagcagttctcccaccttggcctcccaaagtgctgggattatagttgtgagccactatacctggcccctcaaattactggttttatcatctaattctgaaacttctagacacattttcaaactgttaaaatcctgtttctgagtctcatcttagcaataaagaagctagagtaaagatcaagttgtaccctacatgaatacaagccacctcttcagcttcctggtactayctgtactctgtctgaggactttatctccctcttggtcacatttgccgagattgatagaaatgaatccaggcactcattcattcatttgtatccacatgcacatttttttgtatcgtgacttaacacacacacacactctctctgcatctctccatccatatatggtcatgtgtcgcttaacgatggagatactttctgagaaatgcacccttaggtgatttcatcattgtgcaaccatcatagagtgtacttacgcaaaccgagatggtatagcctaccacacacctaggctgtatggtctagtctcttgttctttaggtacaaacctattcagtatgttgctgtactgaataccctaggcaactgtaataaaatggcaagtatttgtatatctaaacatacataacatagaaattgtacgataaaaatacagtataaaaggtttttttcttttaatggtacacctgtatagggcacttaccatgaatggacattgcaagactggaagctgctctggatgagtcagtaagtgaattataagtgagtaggaaggcctaggacattactgcaaactttgcaaacctatgtacttaagctacactaaatttattttttaaaatgtcttcagtaatagattaattattaatactagattatcttagcgtactctaacttttttactttataaacttaattttttaaaatatttttactctttcataatacttaaaacacgttgtatgagtacaaaaatattttctttcattattctataagcttttttctattagagatttcttttttactgtttatacatttttgttaaaaactaagacacaaaaatacattagcctaggcctatacgggggcagcatcattaatacagaggtggaatcgctgtcttccacctctgtatcttgtcctactgaaaggtcttcaggggcagtaacacacatggagctgtcatctcctatgatggcaatgccttcttctagaatacctcctgaaagacttgcctgagcttgttttacagttaacttctttttttaataagtaggagtacactctaaagtaatgataaaaagtatagtataataaatatgtaaatcagtaacatagttgtttattatcattatatgactggaagtgcagtakgtttgtttacaacagcatcaccacaaatacgtgagtaatgccatgctctgtgacatcactaggaaataggaatttttcagctctattataatcttatggatgcgtcatatctacagtccattgttgaacaaaatgtcagtatgtagtacatgactatattttatctgtattattcatcatatagagtactgtggctgctctgtgaatatagttattgtatgtatttctttaagggaaaatgagttctgagatgcaaaataaccaagttaaaaatgaacttgctgggctcggtggctcacacctgtaatcccagcactttgagaggctgaggtgggtggatcacctgaggtcaggagtttgagaccagcctgaccaacatggagaaaccccgtctctactaaaaatacaaaattagcaaggcgtggtggtgcatgcctgtaatcccagctacttgggaggctcacttgaacctggsggggcagaggttgtggtgagctgagatcgtgccattgcactccagcctcggcaataagagtgaaactctgtctcacaaaaaaaaaaaagagctttctggatctctgaatgttatatttctgctgtatcttaaaagcaaacaaaataattaaaaataaaggaaaaattaaaatctttgttgcaatatcaaaacacmataatgacaaaaataaataagaagtgtgagacaatgagataaagtatttttgctggtttatgtycagaaatattttttataatgaataagaattctgattttgagattttatctcaatgtgcagtactttaaaaaatgttttttatattcttttatattgtaccatttctctcaaggatttgaaagaaatatattgaagatgggatcaaagtagatgaatttatgtaccattgtttcaagaatcggaagtgacgacttaggtgctggaaacaacagaaattaccacagcattactatgcagagattccttggcgggggaaaacacccatatattcacatcacactatctgccacaatgtacaaaaaaattctgcagtttatttctggttgatacagttatatggctacccagttaactggttctacttattaaaaagttcagctttgcctcactgatttgatataatacttttatatgtgaaagtctgtgtttaggctttcagttatatcccacaggtttacttgtgtaccactaatatactgtattaatttagaggctttatactatgttttaacgtttggttattcaaacatttcttttattgctgtattccttggattacattattccttaattcccaaggattaacacaaatggaggtttttttccatgctctttccattgagaaatttgtgtcctcgctcagatttaggtatctcccatatttccaggtcctacttcaattcgtttttcaattgaagaaatatttactgagtaactgctattcccaggtaataggctagatgcaggatccagtaataagagagaccgtgtcccttaggagccccaatatttcttaatttgatgagataacactgtgaaacaaaaggtatttagtatgaatctttgatcttaagaggtttgagaatttgtgaatgtatctggaggaggttacactgacaaagttctgatttattcactcattatcagtcagtcarcagcctaaaggaacttacagaacwttccccatgtttcttactttttaggtgtaccaacattccaagaaattctggctcatagattcctaaaaaaaataactgctactcagtgtaatggctgaaggtagtagtgtatgaaccatgtgatccgtagaaaatgatgcacaaagcacactaaaaagccagtcagtaccactatgtacctattgagcggccaacatccataacactgacaacamcaaatgctgacaaggatgtggagcagcagatttaacagccactttgcagtatagtttggcagtttcttgcaaaactagatatactccaaccataagaaccagcagttctgctccttggtatttacccaaaggagtggaaaacttatatccacacaaaaacgtgcacatggatgtttacaaagcagctttattcataattgccaaaacttggaagcaaccaagatgccttttattaggtaaatggagaaataaactgtatctgttacatccagacagtaaaatattattcagcactgaaaaaaaatgagctatcaagctatgaaaatacctggagaaactttaaatgcaaattactaagtcaaagagaccaatctgaaaaggctacatattgtatgatttaaactgtgtgacattctggaaaagacaaaactatggagaaagtaaaaagatcatggtttccaggggttaggggaaagggagggataactaggtggagcacatatttttaggkcagtgaaactattctgtatgatactgtagtggtggatacatgtcagtatgtatttgtccaaatcctgtgggactgttacatgttatgagtgatatgctctgacactcctgggagactccttggttgcctaaggtgcctttcagccaggaggtacagttccccttgtctttgggacttttcttgtgctcataaagtcttttataaactttggtcactcaaaaggaaattttaaatgtgccaaattgaatggagctttagatctggccagtttaagaaaatttgcctaagctgtagacattcacttcctcttttcaaagagaaactgctttctccatgataaaatttcaaatgagagaaaaggttacaaactgtagtgaataagacaagcaagactttttaatctcagagaaaagtgaaaaaatcacaaatatacacaaataatggaataagagaataacaaactaaacgcctaccttaaagtagtgcttcaattccagtctcatcagttgttgaatcaggttccataaagtctgaatctcagtcaagccagggagattcaaccttgagagtagtctgaccaagggcttctgcagtcttcagcgaggtcagttggatgcaacggtccatgctggtgctggggctccagctgttgacaaaacagcaggagtcaatgaaggcctaatttgggtcccatctggttcaccaaaatgtcaccctgaaataatcaagaggcccagaatccaattttaaaagagtttgttcaagtgcaaaatttgagactggccacccagaaaaaacaagactccagagtagttgggtcattgctgagaagtggagaagctgaggcttcacttatataagtagaagcaaagaagtttacaagtattaccacatttttaatacaatgctgatttatgagttacagcagtttgattggttacagcttattctttttcaggaaagatatatttaaaattgcatccctatcaatttggtagtcatggggcctttcgccatctggtctgagctgggtacatgaaaaaggaaggatgttaatctataacaaagaattagtaactragaggtaaggggcaccatttaatctttcacaacgttttacagggcaagaaaaataagaaagaaggttaatctgtaataggaagaaacaaaagttgtagtgacttgcccgtatgagctaggtcttacaatcaatcacattttattcaaggctcagagtaatttaaagtttcagcagctttcatttaaattattttcacattagccatttgagtcttcatttctgtatatcttctttctcatttggggagcagattattttctctttttttgttttcttggcaggagttccttatatattctgtccattaatcacttggcggttttagatgttgcaaatatttcattcataatctgtcatttgtctgttaactttgcctatatcttcctttattaaatagaaattcttaattttaacatatataaattcatcagtttttccttttatcgttggcaatttggagcttttgttaaagaaatccttccccactgataaagtcacaaagttgggtgtttaattcatatattgtattgtttctttatcactaccataagtacgtaagattacaaatttaagattacaatcctaaatcttaaatttgcaatcctagkttggtagtttttgaagctactaagattcaataattactttcaagaattgaggtgaaatttatgtcataaaattaagcattttaaaaggtacatttcagtggcatttagtacattcatagtattttacaactgccacctctgttaagttccaaacatttttaccaccccagaagaaaaccctgtgcccatttagtagttacatcccattttcccctctacacaaaccatgactctcatccatctgtctctatggatttacctattctgtatgtttcatataaatgtaatcatacatagccttttaagtctgtcttctttcacttagcatgttttcattgttcatctatgttttaacatacataagtacatgctaaaacatttaattttaatatataggtatatacattccttatggctgaatgatattccattctatgtatatatcatattttgtttattcatttttccattgatggatatttaggtggttttaccttttggctgttgtgaatggtgctgttttgaacagttgtgtgcaagtgtttgtttatgtacctcattttaattctttttggtatgtacctaggaatggaattactgtgccatttagtaactcaattttaactttttaaggaaccaccaaacttttttccctagtaaccgcaaccccttattgtacatttctagtttcgttccatagttatcaaagaagataccttgtgtgattttagttttttaagatttattgagactgttttatggcctattatatggtctactctggagaatggtccctgtgcacttgaaaaaaacgtatattctgctgctgttgggtggagtctaccatttttaatttgccttttttttggctcagcatttgcttgattgctataaacctttaactctcttcgagagttcccacaattgattctcacagttttgttcattttttttcttttatttttctgtggcaggacagtcctttggagctacctatcctgccatatttgctgatatcactttttgtaattactttttacaaccaatattttatataccctctttaatattctgagataaaatatataggtgataatacaaagggaagtttaaaaaatcagtataatactttaattgtaatataaaagaaaagtaatttatagtaaggtagtatcagtttgttacgtaaacgctaacatgacattggaaagcataatgaagtagtggtatgttttaaataagttgaattaaagaaatgtaagaaaaatcagaaatcattctgtacaagtgctgataaatgaaaatctaaaatctagtcataggccgggcacggtggctcatgcctgtaatctcagcactttgggaggctgaggccggcagatcacttgaggtcaggagaccatcctggccaacatggtgaaaccccatctctactaaaaatacaaaaattagctgggcatgttggccaatgcctgtaatcccagctactggcgggctgaggcaggagaatcacttgaacctgggaggtggaggttgcagtgagtcaagatcgcgccactgcacttcagcctgggcgacagtgtgagactctgtctcaaaaataaataaataaatcttattattaagaccagactttttttttatataaatacaagaaatgagagaaaccatctgaagtgaagttaaattagtacaaattatagactaaagtggtgaaggaaaggagaaagtatggtagtcttataaatttgttggacctcatttcggaaagcaattctttagtaaataatgaagaaatatcagagaacagatcttttattttaaaatcttaacatatatcagatcaagtatttagtcttgagtactaaatatctttggaagcaataccctttcattgataatgagatttaaagatggactttttcataaaaaaggcattcatcgatctctgactagtatcaaagtaagtttgaaaaaaaaaggcagttattataaaaataaaagattcaactgataatttttacagtacattttttatttatccacagataccgatacatgatatgcagtatttttagaacaaccaatgaaattaaataactttatttcctgtgttgccataatttaatatttggtactaagcctgttaaaagagtcttacattctccattacatattttaaattggctatattgcttttacagtgactacacctttacactaaaacattttcaaataagtgcacagtttaaaatacaagaagctgggctcagggactcatgcctataaatcccagcactttgggaggctgaagtgggaggatttcttgatcccagaagatcaagaccagcctgggcaacataatgagaccctgtgtttaaatcaacaaaaacaagtgtaactttcttccccagaaaaggatatgatactcataacttgattcagaagctttctttattatactgtttgtgtttagcctccaggtagtttgttttagcttaactcttaacaaatgttgaatggcttgtttcctactcatttcagatggaataatcaccctttctatattgtaagttcataaaggttttgttgctcagtgtatcttttaaagatagagtcatgcttttcctgctacctagttatggtgacaattaaatgaaatactgtttttgaaagttcataatgtgtttataaaaatctgtgttaaaagcattactattaatattttaataataaatatgacctcgcatgttccagaggctattctcttgagataattaagtctcaatcataagtcaaccttttgaggttatgtaattcttcacattaaaaattaattcataatttcttgccttagattgcctcttaatcagaatcactttttagggggaagtatattttgtgacaaaggtactttggtcctttggttattgtatgttttgaaaatatggaacaaacttccttgcctttattagcactttccaagctggcgttttgtcttagatgtgtaactacctttattttcctgagaacaacctgccttcacatagatttaattgcattgtgatttttagttgtgacatgtatatgaatgtgaaatgcaaagcaaaacatttaatagttttttgtggcttatgtttttgatttgcagccttcaggcaaacttaaggtacctgaggagaatttcttcaatgttcctgctttcttaactgtctcaggacaacttcatctagaagtgatgtcagggtatgaaattttcctttctcttttgctttgatatattatggtttggttgagagtgcttcccttcccatgctcaaacctaaaagttgaaattagtctttatcattagttcacttgaattttccaaaatatttaagcttcttacttgtagtacagacttttgtttttagtgaaaaatgtaacactgaaaatacaaagttgtcatttttttctttttactaatttttcttgcttgaatcccaaacatgtaatcaraatttatttaaattaatcatatttatggaagtaaaggcaatttatagtttatacctgaaccgggtattagtctatttcattttaaagagagtagtatttgaaacagacggaataatttttttttcagtaattggtttaaataaaattaactcatacctacattttgagaggtgtacagcaaattacatcttttaagtcagatcaaatgaattttagcaactgtcagacctctggaaagtcactgtattccttggggcctaccttttctttaaaacgggattgagaaagaagacctttaaaatcctgtctaaatcttatattctgtaattctgtgggtaattcccatttatttttattttttttagaggtgggatctcgcttattgcccaggctggagtgtagttgcacagtcatagctcacaaactcctgggctcaagtgattctcctgcctcagccttctgagtagctgggactacaggtatataccaccaaacctggctaattgtttgtagagatggggtcttgctatgtaccaaggctgatctcaaactctaggctcaagtgatcttcctgccttaggcctcccaagtaactggaactcaaggcatgtgccagcacacttagctaatttttaaaattttttgtagaggtgggttctcaccatgtgtcctaggctggtctcaaactcttgactcaagtggttcttccgcctcagcctcccaaagcactgggattacaagcaggagccactgagcctggcctctgggggtaatttgttaatgcagactcatcaagtactgagttttctttatgtatctttttctttaaatattttctcattatagagattaggacttaaaaaaatcttttctggaaatagctcacttgaaaggaagggaatcttttggtgttttccattgttttaaaaatgcacagatgagaaaactcaaggaaaatgtaatagaatagtttgcatatttacttttgtactttgctagaagaatggaaagtcagtggtggaataaagatggtcttgaaagtaacatgttcttttctgatttatctttgaaacaaaaatatgttatttgatagttccaataaccaaatgactggcaatattagcagaatactatgcagaaaaagtgtcataataacatggtgagattataggatttgcagatctggatgtaggaaaggccgtgtcaagcctgtcatggaatgttcttatgcctacggaattataatttaaaaaaattaaaaacatgactcattcaaatacaaaatgaatttgtatcaaagttttcattcagttgattatattacagaggaaacaagtaaaatagaaaactgtttcaaagagcatctgaagacctctgtatttatagacattttaatagttggaataagagtgctaggtcagttataaactggttaatgtcctacaggaccaacacaccctaaactttgggattatctcttctacctggtagagttatttgcaactctgctgggaaagatctgtaaattagcgtgtaacttcacttaatacgggttatttaattcaatattaaatagactaatggaacaagtacatttccctttccctaagtaattaagtaatcgtcgaatgggcctttgtcccctcattgtgtaataccttgaaaggacatcacctttttaaggctacagcttttggccttatattcaaggtttggataacctttcttaacagccttttagtattcatttctattatttataaagttagaagcaaggtgtctcatccctcagaagtgtcatatgtgaaatatataaacttagcaaatgtttgtttctctattataataccactagtgtattaaatatgcctctttcccagtaaagcacagtgaaccacagaacacagtgttctgtgaaacttgacggaagattaaattggtagaatactaggttttgtattttttagtgtgccatgaagtatttgtactactgtcattcaaatgttcctagtttaatatgcacagttctaggactattaatatgcagaacataatgtttttgattaaagcatgatttattctccaataagaaattgttagtcctttttccctcagctttgttttttcttgaattcaatttaacagactttgtaaaaggcaaaagatttatgcaatctgaagagaaaccagagtattaacagacttttaaaatggagaaaatggtagttaaatttagacagttaacattttccaaaaggatatctctgttgctttagtgggtttatggttccattttaaagctttttttaaagtaaatattctatgttggaataatttttaatatatagaaagttgaaaagataatgcatagttttgtgtattctctatccagtttcccccattgtaaacatcttccatgaccatgatacatttgtcaaaaccaagaattaaatgttatcacattactattaatgaagctctagactttatttggatttcaccagcttttccatcaatacccttattctttttccaggatccaattcagggtaccacataaaacttagttgtcatgtttccccagtctcttccattctattacagtttctcaatttttcttttttacgacctgtggaatgtactctaatctgggtgtgtctgacatttttctcatgattagactagggttatttgggtattttgaaagaataccacagaggcgaaggcttgtcccgtcacattgtatcagtggatacgtgatatccatatgatgatgttaaccttcattacttggataaggtagtgtttgccaagtttctttactgaaaatacactattttttcccttttcttactctaatttttggaagtgagtcactaagtctagtctcccctcactggggatgggggtttgggaagagggagatggagttaagaactacccgcaggagggagaatgtttggaattctatatgaaaatttgttgtctctttatccttctttattttttatttgtgtaatcatttatatcttaatagacttgtatatttcatagtttgggttataattcagtgctgtgttatttactttgatgcttaaaactgttttagtttttgttgttgggaactcattcagattgattcttacgcccctttgatacgcccctgtactttgactaattccttattctctgctactgcaagatgcctcagctttgtttgttgtttgacattcattcaccacctttatttgtttttattttttttatagtcagtaaagttacactgacatattattattcctccaaagtccatagcttttacgagcattcactcctagttgtctgcattctatgcttttggacagatgacrtacgttcaccattatagtaacatacagaatagtttttgctgccctagaacttttctatgctctgcctagccattcttccttcctaaccactggtaaccattgatcgttttaccatctccatagttttgccttttccagaatgtcacgtagttggaatcatacaccatagagcccttttagattggcttcttttgcttagtaatatgaatttaaagttcctccaggacttttcatggctggatagctcatttgttgtagtgctaaataatattctgttgcctggaggtaacacaatttatcagttcacctgttgaaagacatcttttggttgtttccaagttttggcagatttcccaggcttattttttattttcccttccctagtcctaaaaattagttatttctccaaagagccctagttccttttattagaagatggtatttagaagccaaaattgggtcactggatatgtttgctgttactgagagattattgcttttaaacctttcagtagacagagtttttttttttaaactagagaaagctaagtgagttttcattgcattttgcttatgaatataatttataagtggtaagttcattccaagagagatttaaattgtaaaacctgcaattaagaaatgtcacataatgaagtattccatttctcatcagttaaagtcagaattggagaaaggctcagcctaaaaagaaagaatgtttattattattagagggatttgtttccttcttgggcattttaatgcttagccatgaagtcaagcatattttaggttaaaactgatgcttttctcttgactgttgttgttggaataaattagtacagtttttctagaggaatacctttttacccagaatttcatttctagaaatttttcttaaggaaatgatctgacaactctgcagagaagcctaaacaaaaatgttgaaagcaacttttatttataatagtgaaaaattactaataatctaaatgtccattcaagatttgttaaacctaagtataccaagaaaaatagtcatcatcatttatcatctggggctaatgggccttatttttaaaaaatattttaaagccatcttgtagttaatacacagaagtataaataaagggacagtgaagatcaactttattagaaattttcagaagaatttaaacatagcaagtcaaaaaaattaaattgttatattgagagagaacgtatatgccctaaaattcaccaatttgaagtgtgcaattcagtgggttttagcatattttgaagatattcaagtatcactgacataattttagaatactttccaatatttataattttaaggttttatcactcccaaaagacaaattttttccattagcattcactccctatcctcttctttgcccccacccctgggcaaccactaattaagttctctctctatgagtttacctattctggaatatttatcrtatatagatagaatcacacagtaaattgtattttgtgactggtttatttcatttagcaaatgttttcaaagttcatccaacttgcagcatgtatcagtacttcattcctttttattcccaaatagcattccattacatgggcatataatattttgcttcatttatcagataatgagcatttgggttgtttctacttttggctcttgtaagtaatgttgctgtgaacatttgggtggaagtttttgtgtggacatgttgtcatttctctttggtagatacctaggagcgaaattaatgggtcatgcagtaactatgtttaactgtgtgaggaattgctagtctgttttccacagaggctggaccattttacagtcccaccagcaatagcaaaagcattccagtttctccacatccttgcaaatgcttattattgtctttttattgtagctgttctgacaaatgtaaagtagtatctcattatggttttgacttgcattcccctgactactaatgatgggttttcatcattaaagtcaatgagcacatgaaaaggtgtggagcgtctttccatgtgcctgttggccatttgtatgtattttatttggagaaatgtctatgtaagtccttgagttatttttaaaattggattgtctttttattgagttttgagagttctttatatattctgcatacaagtcctttattaaatatatgatttgcaaatattttttccctgtttggtggattttcttttcacatccttgatgttggcaaactcagattttcattttcacttttctgggttttgaaagtactccagatgggcatagcctattgaattcagcaaactgctgaatactgccatgcatgaacctggaacatatgctgtcctttgaatactgattccagatttttaatacatctttaataggctctaacttattattacttctgaaacttatacttacattataaaaaaaatgcttttgagtattttgtccccttataattttgttgaaggaagagtggccatcttttttgccccataattgcaaaacatttttatttttagattgtacaccaattagaatgatcaaattaatgaattcttctgtttctacatcatctttttttttcctaaacacctttataaaatacttgcttcagcatttgttcacttattaaccttagtaagtaaattttggtgtacaaatatcataaatgatgaaggaatattgccacatatccttttagaaaatgggatggtccaaattcttataaattattacataatgaaatccttcttgtggaatgactcattggatggaagtactgaatttgttttttgacttgaaatgtatttttcacttaacagttcttatgtttgagaaaattcacttagataggtatcattatctgaaagctctttgtctgagatttcacttacacaaccaattttaccatcatcattagagagtagattgtcaaccaggcacagtggctcatgcctataatcccagtgctttgggaggctgaggtggaaggatcacttgagaccagaagtttgagaccagcttgggcaacacacgaaaccttatctctaccaaaaaaaaaaaaaaaaaaattagctggatgtagtggcacataccagtattccaaactacttgcgatgctaaggcaggagggcgcttaagcccaggagattgaggctgcagtaagctatgattatgccactgcactccagcatgggcaacaaaaaggggaggagattgttgctgcctctttgcattcatgttctgatttgtctaataactatgaaatacctttatcattttaattctctttgttagtgtgagtgaaaaataaagatctgaattctgaactgtgatctgcaaaaactacaaaaaggctacaaccatgtatccgggcttttctttttttttttttttttttttgagacggagtctcgctctgtcgcccaggctggagtgcagtggcgggatctcggctcactgcaagctccgcctcccgggttcacgccattctcctgcctcagcctcccaagtagctgggactacaggcacccgccactacgcccggctaattttttgtatgtttagtagaggcgaggtttcaccattttagccgggatggtctcgatctcctgacctcgtgatccgctcgcctcggcctcccaaagtgctgggattacaggcgtgagccaccgcgcccggccccgggcttttcttataccttctttaaagatgacacaggcctggcgcagtggcttaagcctgcaatctcaacactttgagaggctgaggcaggaggatcacttgaagccagtagttcaagaccatcctaggcaacatagtgggacctagtctctacaaacaaacaaacaaaaaaaccaaaaaccaagcatggtggcatgtgcctgtagtcctagctacttgggagagtaaggcaagaagattgctggagcccaggagttgtagactgcagtgagctgtgatcacaacactacactccagcctgggcaacagaatgaaaccccacctcttaaaaaaaaaaaaaagaaagagagagaataagaaaacaaattgatataatgttgacaatttatcttacttttgcattttcctcttcgcacccatcattcttctacttttttttttttttttttgagacagagtcttgctctgtcgcccaggctggagtgcagtggcactgacctcagctcactgcaacccctgcgtctcgggttcaagcgattttcctgcctcagcctctcgagtagctgggattacaggtgtccaccaccacacctggctaatgtttttgtgtttttagcagagacggggtttcatcatgttggccaggctgttctcgaactcctgacctcaggtgatccacccgcctcggcctcccaaagtgttgggattacaggcatgaaccactgtgccaggcctattttcttactattttactcttacttaacataattaggaacaattagtaatgatgaataattactaagatgatgaaatggcaaaatgttttaagacacaggaaaaataacaccaaaaccccatatatagcttagatttatggaaggattcagtgggctttattctgttgttaaaatttaatataaatttctgtttttatggataaacctccacagttgcttgaaccgtgtcctgaaaaaagacaagtcctaacctgtgattgcaaccttttttagaaacagggtctttgcagatgtaatcaagctaagatgatgtcatactggattagggtgtgccctaaatccagtgactggtatttttataagagaaaggagagagagatttggatatagagatgtaggagacacacacacagggaagaatgctaagacagagcattctgtgaagccaaaagcagagatttgagtgatgcctaggattgctgagagccaccagaaactaggaagaggcaaggaaggattcttccctagaatcttcagaggaagcacaaccttgctggcactttgatttcagatttgtagcctcacagctgagagaatacatttctgttgttttaagccaacagaatatagcaatttctcatggcagccttaggaaactaatacaacctttaagagtatatgagtcgtgaattattatttttttataaatatttaaaatattttaaaaatattagctgtttttataaatataactgtttgaccaagaaactcaaaaactagctggacgtggtggctcacacctgtaatcccagcactttgggaggccaagacaggcggatcacaaggtcaggagatcgagaccatcctggctaacatggtgaaaccccgtctctactaaaaaaattagccaggcgtggtggcatgcgcctgtagtcccagctactcgggaagctgaggcaggagaatcgcgtgaacccaggaggcggaggttgcagtgagctgagatcgtgccactgcactccagcatgggcgacaagagtgaaactccgtctcaaaaaaaaaaaaaactcaacaactaaaattgggtataatgagtcctggcagtgtattaaaggttaaattatttatgatttgttcatataatggattactgtacagctattaagattgatcataagtctttacatcatgctgttttttaagaagtggttatgaaacaggtagagtatgattctggttttttaactgtatacatatatttatagaaaaagattggaagaatatataacaatattcaacttgtaaaaatggctatttctgctaatttttattttcttcctcaagtttattttttcagatttgaaaaatcagtgttcattacttttataatcaggaaaaaacttagttattttcagtttggggcaatcaacttgggctttgggctgatttcattcctgtttggttaattgattagtttgtgattggtacatgcagttctaaattgactcccttcgattatttaatcaattcagataatgagctcaaaagccatgaaaaattcgtactcaggatgctcttaccctgttttgtggctgtggtgggaatgtcatcatgtgaatctgagttaaagctttacaattgggtgtgaaactgacttcccatctgcttataagactttctcattcttcattcccttgatactgaattttgttcatttatagtcatttgatttttgagatctttttgattatgattcgtgtcttgcatgtttgcrtttctgatgctgttctctatagcattagattgcgttttccatatgtggtcattcctaaaggctcaactgaaataacgactttctacttgactctcttcctgcttttctcatagaaattatttttatctttttctgctctcttatagtactcattcatttcacgtcataaagaaaaattctggccgggtgcagtggctcatgcctgtaatcctagcactttgggaggccgaggtgggcagatcacaaagttaggagatggagactatcctggctaacaccgtgaaatcccatctctactcaaaatacaaaaaattggccgggcgtggtggcgggcgcctgtagtcccagctactccagaggctgaggcaggagaatggcgtgaacccaggaggcggagcttgcagtgggctgagattgcgccactgcactctggcctgggtgaaagtgcgagactccgtgtcaaaaaaaaaaaagaaattgtttgtttttaacatttagccattttgtagttctttttcatatgtaattctcaaaggttttaaatcccttgaagacaagtctgtctcagctccatgtcctcataatcactagcaagtagtagttaaactgaatttgtaaagcataaattctcattcttttataattttcctctactggtttatacagttcgtctccatatatctgagggggactggttccaggatccctctccagataccaaaacttgcagatgcccacgtatttgcatataacctatgcacatcctcccatatattttaaattaatctcgatttcttataatacctaaaaccattaaatgctatgtgaatagttgttatactgtatttttaaaatttgtattattttttattgttgcattattttttgttttttccaaatattttcaatccaaagtcggttgaatctgtaaatgcagagggccgactgtactatagtgttgagcccacaatgggagttaagtctatgttaataattccttttacttcatggaaattatataaccgtgaaacctaggatctttattgttattgttaactgaatgtgtgtgaatgatgataaatacacttctttaaagggtgtattaattaagttcaaagttaaccctgtgtggatagaaatatgaattaacagactatcggtataaatgaggaacttcgtcataaactccttgccaattgcattttctgtatagtattgacagaaggcaagtgtttatggcagatcgatcagcaagtgcaatggcttttaagtaggaatatttagcttccctgggttaaaatagaatgtagatattttagttaaccaggggttgggtatcactaggtgaatttgatggaagtaaatagacttagaaggttataatgatggaccaaggaatctgctgggtaagaagtgaggaaatggaggtagagggttataatggaaaaaatggttgaacataaagaattggaggtcttaatgaaaaattgttggagtggaaatactaaagtaaaaacctggatgaatacgaggtggtagtcaaagtattgctcttgtgaaattcctatttctaacatggattctttgctcagctccccacctatgaactgaatgccagttgtgttctttggttgaggaacaagcaccttaaactcaacatgttcaaaatgaaattcatcatctttttccctaaatctgttttttcctgaattccctgtctcaggaaatggtactaccaaccttcctgtttgtcagatgagatttatggaaatcattctaaattcttgttccataccctttgaatcctttcactcatttgcttccatgtccctttgcttcagctctcctaaactgcttataatattctaagcacatcatcccatttcacacatcatcccatttgtattcctttgcatatgctgtttttttgcctggaatttgctttcgccatgcctttgtctggctaactcctgcctattaggctaaactcagcttaaaaatgatgtcacccagaaccttaaccaccaccatcacctcctccttgtttaaatgtccttctgtgtgcccatgttgctttgtgcctattttgtaacatggaatcgttggtttatttctttatagctttgactgtgagcttttcaatttagggattgtcttatttaattttgtaactattaatacaaaataaagacagttatctattggaaaggggtttctatcaattctatttatcagaaaatattgaaattattwtcttatcttcccattagcctataaagtccttaatctgtatcttgttcctctttgttgtcttagcttctgttactatcatgttgcctgatccagggctcaaaaatcagtctcagttcaatttattgagaaactgtgtgtatcaaaaagtagacatgaacaagacagatataatttcaaccttcgtgaccctatagagtctgatgagcaagatgagcattaaacgagaaattaggagtgtgattactgtcctgagggcaagaagagcatatgtcaagaaaattttgccttgtctacgtcaaattgaatttagaagtaaccttatcagtagagtgattacacggaagtgcatttttaaatgtcattcatgtttaatgaccattggctgttatatttkatgtagattctattccttttgtattcttggacaaacagaaatccagttaatgtagctctttctccccattattgtagagcattttatggtgtacaattttttagttatcctaatacatgttgtttgtgtttggctctgggatgtctctgtacttttatgtcatgtttgatatattatacttgaataaattctatttagccacattatccaaagatagaaaactgtagcttttctgccctgtgtctttatcaacttccaaatacttagaatcttttataaacctttacatgaagaagttgttcctttatagcccaacttttcatggcccagagaaatggttgaagatactggatatgtttagtacagggaagacaaagaggagacatgattctgtagttgttgaagtctatctggtgggtttctgtaagagatatatacagaagagtaaatgatttttttaaagaacaactttattgagatataattcacataccataaaattcatccattaaaagtacacagttcaggccaggtgcagtggctcagggctgtaatctcagggctttgggaggccgaggcaagaggacggcttgagcctagagtttgagactagactggacaatagcaagactccctcttaaattgttttgtttttttttttttaatcagccaggcatggtggtgcacccctgtagtcccagctactttagaggctgaggcaggaggattgcttgagcccaggattcaaggctgcagtgagctataaacacaccactgcactccagccagagtaacagaaccagaccctgtctcttaaaagaaataaaagtaaacaattcagtcgtttttactatgatcacaaagttgtataaccrtcaacattacctaattttgtaacatttttatcactccaaaaagaaactccaaacccgttagcagtcacttcccattttctcctacccccaacccctagcaaacactactgaatcagaacccctgggagtgggacctcccaacctgtgtcacaggccmccaggtgatgctgatgctgagaaccaatgctttagagaaagatcctttgttccctgagtggtgaggacatctggcttctagctatgctgatgggtgggtgggggagcatttactgttcatatgtaaactcttaatgcatccccatttctcctacccccagtctcaccaaggttctgtgtgtcagtcactaattttctgctgcagcatacttcatattccagataacagcttccatgctttgccatattggtcatcactcagccatctgttttctgtccttcagtaatttgtcgcgacctcttgtccactgaaggcccccttcatgattcttccttttagtttttttattattattttaaagttgtctcaggaagaagtgaatagaaatatctgcttaattcaccattttaacttcatttttactagcttgaatggtattaatttgcttttctttaattgctagttaggttatacattatttgcataatgatttagtgtctctgtctaatgtgctaactctgcagtgtctgcttgccgcctttggaaatctaaatactggattctctacccgtttctagtattgaattcctttgtgaagggaatactaacctgccttttctccatttcaagtgtatgggactccactcttctgttacctaattcactgaggtctgtctggctaagcagaaaaagtatatgaaggattgagtgcctttgtaataagcaagtttcatgtgagttgttttaaaaaattcccagtgagccttttgagcaattatataaatagaacacattgtgcctgaaatgctgtgcctgttgatattctctaaaagcaagtgcaggttactgtagtgagatgtgttaggcaatttttgcactgctataaagaaatacctgaccaggcacattgggtcatgcctgatatcccacactttgggaggctgaggtggtcagatcactttcagcccagaagtttgagaccaacctgggcaacatggcaaaaccccatctctgcaaaaaatacaaaacttagccagacaggtggcatacgcctgtagtcccagctactcgggaggctgagggtcgaggatttattgagtccgggaggtcgaggctgcagtgaacagagatcgtgccactgaactccagcctgggtgacagagtgagaccctgtctcaaaaaagagagaaatacctgagactgggtaattggtaggaaaataggttgaattggctaacggttttgtaggctgtacaggaagcatagtagtgtctgcttctcgtgaggcttcaggaagcttctaatcatggaagaaggcaaaggagtatgcgtctcacatggtgagaatgggagcaagtgtgtgtgtaggggggtgtgtcacatacttttaaatgatcacatcacatgagaacccaccgtcaaaaacacagcatcaaaccatgagggatccacccccatgatccagaaaccacccacaaggccccacctccagcattgggtattacaactcaacatgagattggggcagagacaggtagcccaactatatcatgaggcatcagattaatccttagtagaccaatatgtacagtaattggagttataactgcctcccaggttcaagcaattctcctgcctcagcctcccaagtagctgggattacaggcgcccaccactacgcccggctaatttttgtatatttagtagagacgtggttttaccatgttgaccaggcaggtctcaaactcctaacctcaggtgatccgcccgcctcggcttccctaagtgctgggattacaggcatgagccaccgcacccggcccacgtgttcttacttatttgtgggatctgaaaatcaaaacaattgaactcatggagatagagaataagatggttaccagaggctggcaagggtagtgggcaggtgtgcaagtgaagtgggggtggttaataggtacaaaaaaaaaaaagaaagagtgaataagaccttagtattttatacttaatatttgattgcacaataaggggactctagtcaataacttaattgtacattttattttatttttgagacagtctcactccgtcacccaggctagagtgcagtggtgcagtctcggctcactgcaacttctgcctcccaggttccagcgattctcctgccttagactcccgagtagctgggattacaggcacccgccaccatgcctggctaatttttatatttttggcagaggcagtgtttcaccatgttggccagggtggcctcaaactcctgacctcaggtgatccacctgcctcagcctcccaaactactgagatttcagatgtgagccactgtgctcggcctaattgtacattttaatataactaaaaatgtaattggattgtttgtaacacaaagaataaatgcttgaggaaatggatacccaatattccgtgatgtgatttttactgattgagtgcctgtacacaatatcttatgtatcccatatttgtgaataaatatgtattcacaaaaattaaaaatatttaaaaaattttaaaattttttaaaagaatatgagatagtctcatatagagggtgaccagtgctgttagagaatgaagtagctactaagataatgttatscttgccaaaaagtactgatcttgttcaaatgaatgattgtgttagttgaggtaaatgcagtacagagataaattggaattctggctactttatatactagttttataagcttaatgaccgagcctccacttcctaatctataaaaatacattatagtggccacattacagagctgctgtaagcattggataccatgtaaagcccagtgtttactcctgtgcaggcactgaaatattaggtgctatgttgatggtaatgagagcctctgggtcctggagaaccttgggtgaattataaaggactagttgcagagaaaagccaaggtagtgtggccaggaagaaatagctggcaggtaataatcaaattattttatattactgacagaactggagttcatacaaagcagaggattggaacaagctgctgggtttcaggactctcacaagacagatcagaagtttaaactaaatcagcacctggaatggaggaaagaattaagacagagaaatcaattaactgtcagagtttgaagactaagtcagaactgaactaagaagtgagagcaagttagggtataatctgccctaagagctgtagtcatttatgttggcaatgaggtgtcactatgttccagattcttttgttcttggaaggacgttgttgttgtgccccttctggggttcctggagcctgatacttctscttttatacaatagttggaacaagattatagtttaaataattaagtagcagaataaaccagtttattggtaagttattcctgttatcattgtttgtttctttttctttttttaaataccttcaaccagcccataccagttaatgttgtttcttaatcaactttattgaggtatactttataataaaaatgaacccatttaaaatacatcgttttaaatatattttaaatacatgttttgacaaattcttttttttttttctttggagacggagtctcgctctgtcacccaggctggagtgcggtggggcgatctcagctcactgcaagctccgcctccgggattcacgccattctcctccctcagcctctcgagtagctgggactacaggcgcctgccaccacgcccggctaattttttgtatttttagtagagatgggatttcactgtgttagccaggatggtctcaatctcctaactttgtgatccgcctgtcttggcctcccaaagtgctgggattacaggcataagccactgcgcctggcctgttttgacaaattcttacacctcagtaactacttccatgatcaagatatagaattacgctgggtgacatggcttatacctgtaatcccagcacttggggaggacaaggcgaggggatttcttgagtctaggagttcaggactagcctgggcaacatagtgagactccatctctacaaaatattttaaaaattagctgagcgtggtggcacatgcctgtagtttcagctacccagaaagctgaggaaggaggatcacttgagcctaggaggtcaaggctgcagtgaaccatgattgtatcacttcactgaagcctgagcaatagaataagaccctgtctgaaaaaaacaaaaaacaaccacagtaacaacaaaaagaattatttctgtcactcaaaaaattccttgttttcctttggctcgagtctctttccccacccctgctcttaggcaaccaccgatctattgtcaccataggttagattttcgtttttttagaatcttatataaatgaaatcgtatggtatttattctttgtagctgtcttctttcactcagcataatgcttttgagatttatccagtagtttgttcctttctttgctgaatattatcccactgaatggatataccatcaaatttgttaattcgttctctttttttgcatttgttgtaccattttaagtatgtagttcagtgacattaagtacattcacaatttttataaccactagcacacatttttaatgaatatatattcagttttagtttgaataaataacacatacacatatgaaaattttgatcatttgaagagtgttctgtatatgtttgttagatctggttttattgtattaagtcctctctctctctttttagttatcttctgtctggttctttacattattgagaggtttccaatagtattgtaaaactgttttttcccttcaattctgtcattttttgctttatatttgatggtccatcattaggtatgtaagtatttataactgttgtgtctgattgtattgaacctattaatgcataatgtctttcattgtttcttgtaacccttttgtatttagtctgttttgtttgataatagtatagccacccgtgctctcttttgtctcctatttgcatggaaaattttttttccatcctttcactttcagtttatttgttctttgtatctaaagtgaatcttttatagacagcatataattgggtcattttaaaaaatccattctgccaatctctgtcttttgactggagagtttaatccatttacatttaaagtaattactggtaaggaggaacttctctcattttgctatttgttttctatatactttatagcttttttgtcccttgttttctgcattactgtgtttttctttagttggttctttgtagggaaacatttaaatttctttcttattttcttttgcatatattctatagctattttctttgtcgttaccatggagagtacattgaagatcctaaaattataacaatctaacttgaatttataccagctcaacttcagtaacatacaaaaactctcactttcttttcttttcttttcttttctttttttttttttttttgagacagagtctcactccatcacccaggctggagtgcagtggcacgatcccagcttactgcatcctccacctcctgagttcaagggattcttgactgcacttttaacagccccttcttcacccctttcagttgttgatatcacaaaattacatctttatacaggtgtgccccaaaacatacatgaataaatctttgaaatgcattaacctcttaaattaaagctgtagaaaacagaatgtggagttacaaccaaaatttgcaataatactagttttaggtttttttttaaagtgtattagtttcttaagtcagttagaaaacaaacagagcagttatatacacctgaggcatcaggtttatataatttgattatgaggcatcaaattaatctttacaattataatcatgtgtttactttgattaagatctttatttatttatatagcttcaagctaatgcctagtgtactttcatttcacccggcaggaccaccttgagcatttcttgcagggcatgtccagtaacaaactcttttaggttttgtttaagtaggaatgtcttactttctcccttacttttgaaggacagttttgccaaatataagattttttattgacatttcttttagcactttgaatgtatctgcccactgtcttctagcttccaaagtttctgatgaggaatctgttgataatctttttttttttttttttcctttttaaagacagagtctcactctgttgcccaggctggagtgctgttggctcactgcaacctccacctcctgggttaaagtgattctcctgcttcagtctcttgagtagctgggactacatgcgtgcaccactatacccagctgatttttgtatttttaatagaaacaggatgtcgtcctgctggccaggctggtctcaaactccgtgcctcaagtgatcctcccacctcagcctcccaaagtgctgggattgcactgtgcctggcctgttgataatcttattgaagattccttacatgagatgagttgcttctctcttcctactttcatgattctttgtgtttggcttgcaaaagtttgattataatgtttcttggcatgaacctctttgaggttatcttaccatcttggagttcattgaacttcttggatgtttatacattcatatctttcatcagatttggaaagttttcagccattatttcttcaatgtttttttttttgttttttgttttttgttttttgagatggagtcaccctctgtcacttggctggagtgcagtgtcatgatctcagctcactgcaacctctgcctcttgggttcaagtgattctcctgccttagcctcttgagtagctgggattgcaggcatgtgtcaccatgcccagctaatttttgtatctttggtagagacggggtttcaccatgttggccaggctgttctcgaacccctcacctcaggtggtctgcccgcctcggcttcccaaagtactgagattacatatttcttcagatactctctttgcctttttctctcttctcctttcgagactcccacatgcatatgttgggtcgtgttgtggtatcccacaggtcacttaatctctattcattttttttcagtcttttctttctgttcccagactccataatttccattgtcttatcttcaggtttgctgattctttcttttgcctgctgaaatctgcctttgaggttttctagtgaaattttcatttcaattatacttttcagctgcagaatttccttttgttttcctaggtgttctttttttattaagattgccattttgttcatacatcattttcttgactttttccacatcttctagttctttaagtgtctttaagacagttgtttaaaaatcttttttgagtagatctggcttgagatctttctcagggacaatttctgtggatttatttttcccctctgaatgggtcatatttttatctttctttatatgccttgtgatttttttaaaaatgaaaactgggctgggtgccagtggctaacgcctgtaatcccagcactttgggaggccgaggtgggtggatcctgaggtcaggagatcgagaccatcctggttaacatggtgaaaccctgtctctattaaaaatacaaaaaattagccaggcatggtgtcaggcgcctgtagtcccagctactcgggaggctgaggcaggagaatggcgtgaacccgggaggcggagtttgcagtgagcagagattgcgcccctgcactccagcctgggcaacagagcaagactgtgtctcaaaaaaaaaaaaaaaagaataaaagaaaagaaaactgggcatctgtatctaatcatgtgagaactgtggaaatcaaattctctctcttccccagggcttgctgtttttatttattcttttggacttcttttttaaattgttgaaggctgtctctatgccaggcttcagcccaaagtataaacttaatgtcttctcaggtctttctgagcctgcctgattctttccctaggcaggtgccatcactttctcattttccccatatatgcagttgtttttgaccatcctagtctttaatgtctgactcccaaaggaaaataaaagaaaaatgaagtggagaagtccgctggctctttaaataataccggggcagggtggggggtggggaggggcgtgtaacaatcagaggaggtgactgcctctctgtatctctgtgattagaaaccacaatcagcaatctaggcctagattcccagtatttggaggatccttttttctccaactcagctccctcaagctgtgtgcacggggttccaggaagacgtgcacagctgcctccctcagggctgggagaggggtatgggcaactgctactgtgctaagagctgaaattgaccaaaactaactacaatttactgtataagcctttctctggaagttgcgggtattccatagactgcaagtttcaaaaacagttacatcaggccaagtgcagtggcggatgcctgtaatcccaacactgtcggaggctgaggcaggtggatcgcctgaggctgtcaggagttcgagaccagccttgccaacatggtgaaaccttgtctgtactaaatatacaaaaattagctgggcatggtggcacattgcctgtagtcccagctactcaggaggctgagacaggaggattgcttgagcccaggaggtgaatgtagcagtgagctgagattgcaccactgcactccagcctgggcaacagagcgagactccatctcaaaacaaaacagttaaatcagacaaatactactagtgcacttgtctaggtgggtagacagattcctggtggtttcttctctgccatcttcccaaaatactgtcaatccatctgtcgtttgatacttagttgtttcctgtgtgtggagctattgtgatgatgaagctctctgaaaattcatgcaggagtctgtgtgtggacatatgtttttatttcccttgggtaaataactaggaattaagttaatgcttaactttgtaagaatctaccaagtaatttgctgaagtaattgtattatttacatgcccgctagcagtggatgaggatgccggttggtccacgtctttgacaaaagatgatgttgtatttttaattatagtcattctagtgagtataggatatgtcattgtggttttaaattgtatttctgtagtgaccagtactgttgaacatttttttcatgtgcttactggctgttcatatatcttgtttttgaactatcttttcaatttttttcatccaatttttactaggttgtttgttttattattgggttgtaagagttctttatatattctggatacaagccctttatcagatataggtgttgtactttttttccccagtctgccttttctttccattttaaaatagtttttttgaagaccagaagcttcttattctgttagtgtattatagtctttttcttatgtggttcatgaatttctttatcctgtccaaaagattgccaacatttttcttccatgttttttcctagggattttatatcttagcttgtatttttaggtcagggaagaccctgctagtctataaactttttgaaggtacaggccatacctgatttacctctgtattttccacagtgattagtagtctaataaatatttgttgaatgaataaatcaatatgacttcaggtagataatgatgataagatacagacagatagctaggccctaagcttctgtatccattccttctttgctgctataacctgtgagcttgaattacttccatgcttttgatttagttcaccagtatattctagttggggggaaaaatcagttaaaaaaaaaaaactccatcagaaaatgcatttaaaaacttgaaatactatgctattggatctgttaggatatcttaaagtacccttattatgtgaaactgaaatttctttttctcttttaacataagatatatacatacgtatgtgtgtgtgtgtgtgtgtgtgtgtgtgtgtgtgtgtgtgtgtgtgtgtgtgtgtattttgttttctttaagagacaaggtttcattatgttgcccaggctggtctcaaactcctagggtgaagtgatcctccttcctcagtctcccaaactgttggaactacagacatgagctaccactcctggcttcattttacattttcatgcagtgggtgtgaatttctcttgctatgaattcagaaaatttagtggtttttttttttttaagtcaaaattgtaaaaatttacctgtgaactgtgtgcatgaattatagaaaccacggaaacatttccgtgtattttacttcactgaaacccactaacaaccttaagtgcagttctgggggcagagctggggcatctaaacaaggacactttaaagagtgaaagggagggctgataacagttattctggagcagtcagcataaaatggktttttcctgggcaaaccaagacctgtgatcaccctaaagttgatagatacgaacagattaaatttctctcttcaccggtgttatatttgcttgtttttagggaaccacttaatagaaatgcctcataggctgtagaagatgtgctgtaacaaagactgtaggaaaaaataatatgtgtatgtgtgtttgtatgtgttttacagaaaataaaaggaaattttatctttgctcctttagaaaaaattgccaataaattcagtcatggttttccttccctctcacaagtaaaagctgataacaaataagcttagtcacatgtattcgttgctagccacattagttttatttattttgatgtcaattcctattttatttcccacatataccctacacagaaaaaaaaaaaaaaaaaaaaccaaactggtgttttgccacatgaaacaggtgtaagggacggataaacagacatgtgtcacatagatctttacagttggagaatatgcaaaacccaagccagccttatttcacatttaagaggtggatttagcatgtgaattaggataaagatcaggaggtagagacttgttttttgtttctggaacattctttagggacttttatttagtttcttcaactgggtaattattctgggctttcctcctgattctcctttaggacaatatggtgtgaagttcagtggaaaaatttgaattttaggcagatagtattttagggactactgtagaaagagttatctcagaagttttcttagccaaaatatatgtatgatttgatgatactggtatttcctatatagcwgtggagggttggctgtaacttgggaatttggagataacggttcaaatagttcaacccagagtttctctgccttttgtataggtcatcccatgatcctatcattaagagtgttcatttttagtattcatgcagcctacaaggcctggcatggcagagcatgccattcttcctcttcttccttctcctcctcctcctccttcttattcctccaattcagggaaaatgaagagggatttttcatatattctttctataggctaactccttctgtaaaagcagtttgcctatttctactttttgatggttcctttgtgcttttatgttcataaaccaagctctgtttgatttggagtctgtcaagagtattagaaaatttttatttcattcatagtatataggcctctgcaagtgtaccctttttatgaaatactacctttcgtatcaattatctgtgccttttactttcaatcataagtggtaattagaagagctagatcaggctgggcatggtggcttatgcctgtaatcccagacctttgggaggctgaggcgggtggatcacctgaggtcaggagttcaataccagcctggccaacatggagaagccccgcctctactaaaaatacaaaaattacctgggcgtggtggcacgcgcctgtagtccctgctattcgggaggctgagacaggagaatcgcttgaacctgggaggcgggggttgcagtgagccaagattgcatcactgcactccagtctgggtgaaggagctcagtgtaccattcagcatctgtgctgaactttttactttttaagagtgcacacttgcagcagtacagtaagtgggccctggatttggactgcttatgttaaagcagctttgattgtggtgctctggactatttactcacttgtctaagcctcagtttctgaagttataaaatggaatgaaatcacctctcttatagggtagcaaggatgaaatgaaatgtgtgtaaagtgcttgatagacaatctcgtcattcaaccttttttttttttttttttttgagacagagtctcactctgtcacccaggctggagtgcagcggtgtgatcttggctcactgcaacctccgcctcctgggttcaagcaattcttgtgcctcagcctcccaagtagctgggattacaggggcatgccaccacgcctggctaatttttgtatttttagtagagacagggtttcaccatgttggccaggctggtctcakactcctgacagcctcagctgattcacgtgccttggcctcccaaagtgctgggattacaggcgtgaggcgycgcgcctggcctcagtcaacttttaaaaaatgtgttgtggcaaaatacacataagataaaatttaccattagtgacattgtacaaccaacatcactgtctagttccagaacatttccgtcaccccaaaaggaaggcccatacccgtaaagcagttgttctctgttatgtactgaattgcctctcccctaggattcatatgttgtattgtcctaacccctatgtgattgtatttgaagatagtactgttaaaaagtaaagttatatgaggacataagggtagaaccataatccagtatgactggtgtccatataagaagagataccaggggtgcttgtgcacaaaggaaaatccacatgaggacatagcaagaaggcagccttcagcaaaccagaaagagaggcttcaccagaaaccaaccctgctgtcactttggtcttggatttccggcctctagaactgcaggaaaattaatttctgttgtttaaggcacccagtctgtgatattttgttataacaactcatgtaaaatagtgtactctccatttcctccccacccaatccctggcaaccactttctgctttctgtttttatagatttgccttttctggatatttcatatacaggaaatcatatagtatgtggcctttggtgtctagcttctttcacttagcctagtgtttccatccatgttatagcatatatcagtatttcttttttatggctgaaaattattccattgtatgaatataccacatttagtttattcattcattgatgaatatttgggttatttctgttttttggctatataatgccactatgaacatttatgtacaaagttttgtttgaatacctgtctttattatttctttgaggtatacattcaggaggaaatagttgggtcattctatgtttaatttattgagcagccaccaaattgttttccataacagttatacaatttcacgtttacaccaacagtatacaaggagtatctctatatccttgccaacattgttrttttttattttcaaaatttagccatcaaaaaaccttttaaaaagtatattaattagaggtctaaaccttttttagggcagtatttctttatcaggattcacatcataattactagtagagcttttaaatatatccgtgaccaggacccttcttagactttctgaagagaggtcttcagaggtagagccctgaactaatactcttcattaagaaccattgccaaagatagtggttctcagcatatggtctggatatctctggggcttcacatcctctcaggggaatccttgaagttgaaactattttctaatactaagacagtaactgcctttttcattctcattgtctcaagattttatatacagtattttccagtcttcatggcatgtgatagtgcaacagattgaatgcaaatgtaggtatgagaatctagccaccttttgttaagccagacattaaagaaacttataaaagtgtaaagcagtgtcactcctcttactaatttttttgttttgggaaaaaattatgtttcataaaaaatatgttatttgtaacacataatggacttgtcattgtttttgttttgtgtgtgtgtatgtgtgtttgagacagggtctcactctgtcacctaggctggagcacagtcacattatcacagctcactgcagcctcaacctcccaggctcaatcaatcctcctgcttcagcctcccagctagctgggactaaaggcgcatgccaccacgcttggctaatttttgtattttttgtagagacggggtttcaccatgttgcccaggctagtctcaaatcctgccctcaaaagatccacccgcctcggccttccaaagtgtttggattacaggcatgagccaccgtgtgcggccttgtcattatttttaagtaacacaaacataattttaatttatcaattttagtagtaaacgttggtagatacaacctagataaaccaaatttctttgagatctacaataatttgaagtgtaaagggatctttacaacatggtgaaacccccatctataaaaaaatttttaattagctgggcttggtggcacatgcttgtggtcctcgctactcaagaggctggggcaggaggattgcttgagcccaggaggttgaggctacagtgagctgtgtttgtgccactgcaccccagcctgggtgatagagcaagaccctgcctcaaaaaaaaataaataaataaaatcaagcaaatgcaaactgtagcccgatggaaaggaaggagacaaaaagtaactttgatccatttgttctcttaccatatagttggtgttaggttaaccttttgatgtatttatttcatttcatctttataataacctccatgacatttatatactcaccctcatctttgcatggggaaatttagtcttacagaaattaagaacttagtttgttcataagtggaggagccatgatttcagcttgggtctttagactacatgttcttaatcagtaccataaccttaaaaaagtgagtcatctggacaggacttgagtccaggaaattgttgatagttcaatgctataatgactcctctacctctgtagtatcaggcctgagaaaagggaacctttgaaatatttgtagacttaaataacacttaaacactatgtagtacatgtaactaaagtaaagtacttacatgttgttctctttagtggtcctcagagcaaggaccactaaatatgagaggtgtaagagggataatttcgacacgagtaagtgccgttgacaaaattatataggtaattttagtgtcttattgagacataaggataaatattcagttagaaagaacagtcagatttgtgaccttttcaaataatgttattttctaagcccccatatccagtcagtcctgaagagtccattgttgcaggaatgaagtggcatttcactcaggagccaaagaatcatatactgctgtgtttacatagaatagactaggataattattttcttgtagtaatgttatagttaatttaaaatttgttctaattagagcagttcacccgctctagtccttttcaaagattttcttgttgacagagcaaaaatatgtgacagtttttaaaaactgatgctgttactctctagtgccttctgtgaactattatttcgcagaacagaattattttttgtttagtaattgatattctatttaccttccttttctacccttaatcccatcccagtgctgtttcaaatattcatttgggaagctgggtgccatagtgggcatgtgtaattcctccttcttggaagcctgaggcaggagggtcacttgaccccaggagtccagtctgggccacataggagaccccatctcttaaaaaaagtgcaatttggggatcagcatattttatagaagaagaattacttatttgacaaatattgactagtatgtgttaggcactagattaagactgaggatgggccgggcgcggtggctcacgcctgtaatcccagcactttgggaggccgaggcaggcggatcacgaggtcaggagatcaagaccatcctggctaacaccgtgaaaccccgtctctactgaaaatacaaaaaattagccgggcgtggtggcgggcgcctgtagtcccagctactcgggaggctgaggcaggagaatggcatgaacctgggtagtggagcttgcagtgagccgagatcgtgccactgcactccagtctgggtgacagagcgagactccatctcaaaaaaaaaaaaaaaaaaaaaaaagactgaggatgaggatgccataatgaaccaaataaaatatatatatatgtatatagtygctcatgaaattttcaatataatggagatggatgttaaataatcacatcgattgatgtaaattttttattttgaaaggtgctgtgaacagtaagtagtacttggtgttattaaagagcatattggttttttcaccaaaccaacaggaaaaaaaaaaaaaaagagcgtattgggaagattggcctaggaaggttgggagacgactgaaatcaaagtggaagctggggggagacatgagttcagtttgtgacaagtggaaggaccaaataagcagatggatatatacttttggaacttagagaagagggctggttagaaggtataaatttgtgtgtgccagtaagtagttaactgaaatcattggccaagggaaatcatataaggaaaagtatcgggagaaaagttaaaggttctaggggtaactttggaggagtgctactgcttaatgaacagctaaagcggcatgtaaaaggaggcagaaatagaggtcagagcagtatttagaaggaaaackaggacagtactaggaaaatagtgttaaatgtttcaagaggcgagggtatttcaaggtgtatcaaataaaatctggtcactgcttactgtgtttacaaggaaggccctgcatgttctggtcctttccaccatctcttatcattgatcctgctactggcctacacctgttctttaaattctttaaacatgtcaggctccttcctaccttgggacctatgtgttggtgtttgctttgctagaatgttcttttcacatgtcatctcctcagatggttagctaaccttcctccccctttagcaggattgttgtcagactctgtcaaacttggaatttcatcatataatttagattaaattttgcttgggtctcaaattcagttccaaaaaaaatattaagaacatgttaaaggaaattatttggcacaagtttttggcaataaagataagaatttttagaatttagaattcaccctccctaaggcatcttgacatgacatgattgttgaaatggtgaaggctgcatctcttttataatccctttccaccaagtgtattgcatggtggacagataggggaaagctgaaaagggggtatctggagtctactcttttaggcatgtagaaataatgaatgcaaaatatatcacagtattgacaatccagtgaacacaaaacagtagtaaaatagatgttcattttcctgaatgatgagaaaagcacttggcaaaaactttcaaaatccagtttaatagttttctgggagttcacttaaggtcaatgaacttttactaaactaacagtaaagaagtgatatggaggttgggggtggtttgggaagggtgtagtgaaagttgctgatcagtcttatgctgaataagttcttcccaagctaaagaatcgcagttcctctgttctttcaaaatgttaagattcactgtgaaatttcagggccagaaagaataaatggccaggcaatcagtgaccactttatattaatctatttgccatcttgagggcttcataaaactccatacacgggagaaagtgaactttgtagaaccttttttttttttttttttttkcaattttgctttttattttccaaagagccatttttgtagctatctaggttgatgtgtattgaatgtacttttgttatactaaacattaactccaagctcatggattttccttatatagctttcctctcttcatagtttggcacaagaatgattcttagtgccgagtgttttctttttctcctggtctcttctcagagcaatactggcctttcacctggttttgtatcttattttagaaatggccttgttctcagattttatttaaatgttggttggttcagtctttgctgcaaatggctttcatgtctgtggaagataggaaaaaagaaagaaagaaacataaattaaaatagaagtgattccacatgcagctagagacaaaattattgcaaaagacagtagagatcaatgccaagctgtccccaacccctactcctatraggatttgaagaccagaaaagctaaataacttgctaaagattacaaagtattgacgagaatatatctatcattctcattattttcatgaagataacattctagagagctgtattttaacacgtaaaacaagctattcataatatgccaaactgcttcccctagttrtctttgagaagggggaatatactaaaaatttttctttctaattttctgagtttgcagtgttgttttgagcatcattgttgttagtatcatggttaaggctatgagcattagagtcagaaatgtggatttgagtttggcttccaccatttactaagctatgactttgacttttgggaaagcttcttaacccatctgaactgcagtttcttattctggaagataagtgtattaatacatacgtagactgagttaactatgaagggattaactctaaggttcttgtccatttagygcttggcccataatgatcattccataatggtaaccactagtactactactactattgctactattacttataatagaacacttgatactgaacagtatctttggatactgacatagggtgatcattattgaattatttaaacattcatctgcttaaagattagatgctttcttacgcaatttttcaacataccttccagttcattttatcactctgttactttagaggaagcactgtggtcattagttcttactctatcaaaatgatatttaactctcagatacctcagtcagagcctgatccttactataattgaaataaaaattattgagcctcttctgtattttatactagagaccttgccctgcattgccagggaaaatcattaaccactgcaaaatttaaaaatccctattgctgctcatcttggagcatcctgtgctccataagtatacacacaatttcttgtgataaagtaccagaaatgtcattttacttatttagatgtactgtactattgccaacctacctagagatggcacagtcacagattggaaactcagggccttgtaattgttgaatttattgtttgggccagacctggattgtttgaccccttttaggtactgagggygtcagtgacatatatctgagtatttttctatatttgtaatgttaccgtttgtgaggatgtgctttttagtttacaactgaggaagcctgtcatcatcattagtactcattcattcagcatgagcacctgttttatcttaggcactagagatgcgaatatgaataaaacatgattcctgttctggaaaacgctgggggagaaaaataacttagatagttacatttcaaagtgatatgttctatataataaatatgaaaaagtgttatagtaatatacgagagggagcaataaacttgggggaatggtaaggattcaaaggggaagtgacagttgagccaagtcttgaaggatgaatgggaattttctatttggagggtagaggagcaggggaggaggcaatacagggtagggaagagcctatgcaaaaactaaaggacatgcatgggacacgctaggaaaggagaaggtcttcagagtggctggataaaaggatgtgtgggaaagaactgagttgaaattaggagttagaattttattctttggtactaaggaatcattgaagattttaaaattagggctgacataatcagatttgagtttgggaacctatagtttgggactggaggaagacaggtgccagacaccagttaaaaagctgttattttctaagcagtagacaaaggtttacactgacaatagctgtggagatagagaaaagctgcgagatttcagagttttccaaggtgtaaacaactaaattttgtgatcaaaatgataagggccatctaataagctggggaatgtgggatctgtcttggttgagttggtggattaactgagattaacagagctggaggaaatgtaaaaagaaaggcaggattgttcattttgtcttttgtttgttttggggaacagggtcaaaattttcattctgcataaggtaggtttagtctttttcaaaacattctagtaggcaagtctgtagctgaatcttggaagaaaggcaacyatagtaatatttttgagttcctactgtttattttttcaataaaaactcaggttctcaggttagcagatcatggtcttaggaaggtagctgtagaaccaaaatataaattcctaagcttctaccaattgggtcttactgaaatggcaattgagagagaagtaaatctcttggttttcaccatagttactttatgtttcctttcccagagtatctttactaaaaaaaaaaaaaaaaaagaaaaagaaaaaacttatatatatacaaaatccatctattttctacactaagttttctgatcttaatattatttggctaaatgacagattaggtgtgctcaggatcaaggatcatagctaaggagcctcaaacagcttgctttgttctaacaaaaccttaacatttaaagattaagtcctcaagaaatatttattacttcatatgtgcttgatctaatctcagctgttacttggtttgaatgtgagggaaacaataagtattaaagaatgacggatgtagtgtccacttcactataggagtttaagaataagggatttttctccccatttggrtggttgagctatagtcctctggaatcaagggaataaagtagttcctcaaaatctctcacctccacatttcaggggtcattcaccattgattgaaagacaggtggtcgtcaaggacttgagtgggctttgaacaaggtgaactgcaatatgtatctgacgttcttttttcttgtgtttaaaaaataaatgaacacaccttatctacatgaaattctagttttcactgttattatctagattttctgtggggtttcttgggctgcggtgtttttttctttactttgttcttgattgctgtgaaatgtagttgcctgctgttttaaggcagctgcagtagagtgcacccagaagtggttatgtttctatatttagtaaaaccataggatttgtgaagcagttgcagattccttcaggataaaatggtttctataaatgtaacttttttttttcttttttttttttgtttgtttgttcatttattgagacaggatctcactctcgcccaggccagaatgcagtggcatgaacatggctcactgtggcctccacctcctggactcaaacgatcctcctgcctcagcctcccaagtagctggacctataggcacaggccatcacacccagctattttaaaggattttttgtagagataaattttcaccatgtttcccaggctggtcttgaactcctaagtttaagcagtcctcccaggaagtgctaggattacagacctgagccactgtgcccagcctcaatgtaacatttttaatgaaactattattatcacctattagagaaatatatagcagcaaatatgtgtcagtctgtggacaagacagaggcacacaaaactttattttccgtaagagctcactgaatattttaaatacttaaaattaatcatgtgaattctatttgcattctcttaatcttgaattgcagagcttttactcaagtgtttacctttggtccgaccttccgagctgaaaattctcagagccggaggcacctggcagagttttatatgatagaagcagagatttcttttgttgacagccttcaagatcttatgcaggtaggtacacaagttttaaaataccaggtgacattaaaatgtttctgtatatatttttacctcggacgtttatgtgttacaggtattcataaagtgaaaagaaggggtaactacttaataaacacttattgaatgcctttactgtaatagtttaaaatacaagagtcagacagatttaagtttatatcccagctctgccattagctttgctatgaagttccctgactttcatgatctttaggttcctcaactctaaaatgagaataattgtgcttactcctaaggttatgtgaggggtaaatgaaattgtatatataatataatgcatatagcatggggtctggaacacaagcaggttcactaaatagtagctctgatttgctaggaaaatataccaaacatctttataattatataaatgtctgtaatacttacataaacccctatgtagctatattagaaagcatccacaggagctatcagctcagttgagcaggggacaaggctggagagatggtcatggtcaggcaacagatcatgaaagaccttgtatttcagtgccatagtaaggagtttgaactttacccaaaatttaaggagcaagagttctaaattggaaaatgaaggtcagagctatattttaggcacatctttttagcagcaatatgaacaatgatttagaggtagataaaagtagagaggccttgttaggaggctgtagacataatccagacagtgcacacaagtggaattgaatggaccaagatttgatgcttaaccactcacatgctatgtgaccaacttagacaagggacttaatgtctctaggcctcagtgtcttcatcaaaattccaatacataggaataaaaattcctactttataggctacttgagaagatcaggtagataaaatctatatrtgtgtgtgtgtgtgtgtgtgtgtststmtrtatatatatatatatatgaagtacttagcataatttatggcacttagtaaatacccaggaattgttaactgttaaattatgaattgtctattcagaagcattgtggttactatcttagtttggatttgtaattatgggatgtttattttagtgattttcatcaactctcctttctgttcatttctatgtctttctactcttacccagtaaatgacctatttccacttaaaacataaataccatatatatcacaaatagaacagactaattattttattaccctgtcttgagttggatttcctagtaaacaaaactctctaaggcagagatgtgtgggcaggggcgttattagggagtgctcttgagaacagtattcataaggaaaggaagaaagtcacattgaacagtgggaagtgtgaactgtgatccatttacaaacagaggccttagctkcttctgtgaagaactttggaactggaatggtcctaaaccagatgggaacagttgtcccatctaaaagcaaggcgttagcactttgtgccttcccatatcaaccaatcattggatgtgattagccactggaaggggcataaccttgagtaaggcagtacctttgggtctcgacagttcctgatgaagcactcaactataaaccatcagcagttagtaatattcctggattcccatatagggcacttggccctgaaggggcattctggccacacaatatagcatttcacttccatgctccctttacacttcccactgagcattttggatcagtccccatgggacatttttggttatccctattagggaatgggcagggaagggggagagtggtcactactagcatgtagttggtaaaggcagaagtgctgttcaacaacctaaagtgcacagccaccttctccccggtaattagctggcccaaagtatcagtagtgctgctgttgaacaaccatattctggactgtagggattcaggatctgagcttcagaaggagtcagtggcattccttaagtagctttcacttgagcccatcccctaattctttattaatctttgttctacaattatattttaccatatgacagggttgcaagatatcgtttatttttctcagttatattagtaaaaacattgaggaatagataggttaagctacatacctttttagtaagtgtgagcagaattcagttacagattttcacctttgcattcagtcaacagtgccatgaaattattttattctgctctaaaccggagcatttcaatctaaacttagggtttaaaattagtcatttctttatttcattttcttttctttattcttttttttttgaaacagggtctcactcttgtctgccagggtggagtgtggtggtgcagtctcagctcactgcagcctcctgagtaactgggtctgtaggcacacaccacatgcccagctaattttttggtagaaacggggttgcccaggttggtcttcaactcctgagctcaagccatccgcctgcctcagtgtcccaaagtgctgggattacaggcatgagccagcatgcccagcctcattttctctttttcttccatttcttgactttgtttttatctgtagatgccctgactgatggatttttaggctagtttcttaagctttggtgattaatgtccaggaatactgtgaaccagaagaaaacacagagtcattttattcagagcattgccttgtactacctttgctggtgttatctcagatatattccaaaataagttgggaactgattaaaaagggttggactactccagagagatcagttatcccaggagaacagttacttgtccagtggctttagatggggtgggcctgggcaaggaggtagcttcagtgacgttactccctgagagttgcataataggtgtctgaagcagttttgatttatcccttcaccagttgaaggacatttagtttattctgcttttgaaagtaatgaacaaagttgccgtaaatatttatgtgcaggttttatatgaatgtaaagtttcatttctggttttttgttttttgaggcagggtctcactctgtcacctaggctggagtgcagtggtgcagtcatagctcacttcagccatgaactcctggggctcaagtgatcctcccacctcagcctcccaagaagctaagactacaggtgctattttttaaattttttatagaaacaggatctcactgtgttacccacgctggtctcaaacttctgggcccaagtgatcctcctgcctctcagcctcctaaagtgttgggattacacatgtgagccgcagccacccagactcatttctcttgggtaaattcctaggagtgggattactaggtcagtgtttgatgtgatgttttatagtcttcattatacagatcttggttaaatttacgcctaagtggagttatcttttggtatccagaagggattggtttccagaccctccccactccctgccattatggataccaaagtccatggttacttatgttccttatataaattacaaaatttctttcattttatagggaagaaatctgttttccaaaatgactgttccattttgcattcctaccagcaatgtatggaagttttacttgttctagttcttcattagtaccaagtactgtcaggcatatgtggtggttttaagccattctaagagctgtgtattagtatctcwttgtggttttaatttgcatttccctaatgcttattgatgttgagcatcttttcatgtacttactggccatctatatgtcatctcctgtgagatgtatttttattgcccattttccatatggcttgcttgtttttttcactgttgaatttagagaattctttatatattctagctactagttccttgttggatgtgtggtttctgtgttctcctaataagtagcttgacttttcatccccttaattttgatgacatctagtttatcattttttctttcatggattatgctttttgtgtcaagtctaagaactctttaccttgccctagatctcaaggattttatgatgttttatagctttagctttacatttttcatgtaagtctatgatccattttgagttaatttttgtgtaacgttagacagaagttcttgtcccttcctttcctttcctctcttctctttcccctttcctttctacctctggataacttcttgctccagcaccatttgttgaaaaggctgttagctaaacttcatgtattgaattgcttttgggtctttgtcaaaaatcagttggtcatatatatatggatctatttcagaatcctctattctgttccgtattctacttttttaacacttcaagtaaaacaacagtcttactactatgtatttccctttaccttcacccctttatcttatagttgccatatgcattacaagttctatgtattaatttcctattgctgctataacacgtcaccacaaacctggtgggttaaaacaactcgaatttattattgtatacttctggaggtgagaagtccaaagtggattttactggtctgaaatccaacactgctaaaaggtgtcagcagagttgcattcctcttggaggcttcaggggagaattaggtcccttgcctcttccattttctagagactgcctgcattctttggctcacagatcttaaaaaccagcaaggtatcatcttcaaatctttctaactctcaacaccctcatgcctccctctttcacgtaaaggatccttgtgattacattagtcccacccacataatctagaataatctcatcatttaaagattcttaatcacacatacacagtttttttttttttttttttaccaggtaggctaacacactcactggttctgggattggagcatggacagctttggcagagggataaatattattctgccaatcacaattcacataccttgaaaacctctggtgatgtttgaatttttgctctcaatcaccatacatattttaaataatttcagaagagaaaaaaacatctgttgtatttacctacatttggtagtaatagtaaattactgtttctgttgttcttgtttcattactcaagttccagatttccttctggggtcactttgcttcagcctaaagaatttcctttaacatttaaaagcatttctgctggcaatcagttcttagtttttcttcacttgagaattttttcattttactgtcatttctgaaagatgcttccacaggatatagaattttggcttgacagttcttttctttcagcactttaaatatagtctgctatcttttgacctctgtagtgtttgagaataaatccagtcttgaattgttttttccaatgtaaagggtcatttttctcggtttctttcaagatttttttctttgtctttggttttcagcacatggattatgatatgtctaggtataattttcttcgagtttatcctgtttgtgatttagtgagctccttgaatatgtctttagccaacttgggggagttttcagccattatttctttacgtatttttttctgtgcccttttttgtcttttctgcttctggtactccagtaacacaaatgtaaaaccttttgatattgtcccatggtgctgtgatgctctgcttattattaacgagtctgtctgtctgtctttctttctttctttctctctctctctctttttctttctttcttttttttttttttttagacagagcctcactctgttgcccaggctggagtgcagtggcatgatctcagctcactgtaccctccacctcctgggtttaagcatttctcctgcctcagcctcctgagtagctgggattataggcacctgccaccatacctgactaatttttgtactgttatcagagacggggtttcaccatgttggccgggctggtctcaaactcctgacctcaagtgatccgcccacctcagactcccaaagtgctgggattacaggcgtgagccaccatgcctggctagtattttttctttctgtaattcagaattgggggcatttcaactgaactgtcttcaaacttactaattctttcttcttttgtcttcattatgataatgagcccatcctgtgaaatttttatttcacatattttccaattctaaaatttttatttatttatttttagtttctttttctccactgagaagttcagtctttctctttaagaatgtttccctttacctgtggaagatgtttataatacctgcatcaaattgtcagataattccagtatttgagtcttctatgtgtatgtgtctgttggttattttttctcatgagaattcataagattttcctggttctttgtatgtccggtaatttttaagtatatcctggctgtttttaatgttgtgttctgacactctgggttctgttaaaatcctttggaaatggaattatttttgttgttgtttttaccagttattagactggttagattgagactgtaagttttattttactttctattggcattggtctccatgtcagttaagttttcaaagcctctgctgtgctatttgagtctttctgatgcgtgtgctactcatagtctggaaattgcacagtgatttgtagttcattgtcagaagcattcactgtgcttctttgggtctgtttcacatatacatttcttggaggtgagccctagccttatgttacttcatacacaattagagggtcaccttctcctgttcttcagaatttccttcacactgtctggccccccattttggtttctctggccagaaagacagatttctcccaggtcttagttgccaccatgttattcatttccaggtgactgtggccaccattgggtctaactgacaagagaaaatatttaaaaaaaaataataggctgggtgcagtggctcactcctgtaatcccagcactttgggaggccgaggcgggcagatcacctgaggtcaggagttcaagaccaatctggccaacatggtgaaaccctgtctctactaaaaatacaaaaattagctgggcatggtgacatgtgcctgtaatccgagctacttgggaggctgaggcatgagaatcgcttgaacctgggaggcggagattgcagtgagccgagatcgtgccactacactccagcctgggcgacaagagcaagactccgtctcaaaaaatagtagtaataataatagagattacccacatccacgctcttcaaaacagcagtctgcctttcccagttcctctgttggagaagtaggtcttctcttggtgttttaggtgcttgtgccactgtcaccctgacagtgccactccacaactggggctacattttggctaggaacagaagagagaaaagactgggggacaaaacaaccaaggattttcctaaaaacactatcctacagggactttaccagactagtagtaggagctttcttctagaagttttgcttcctatgcctactaaacagatcaacaacgttttatccccaaatcaaaaccaggagacaaaggaggtaaaaatggaactaaaattcatctccatttcaggttattaatcaagttgactagttcccattccacctatcattgtttatttttctgagtccttaggtagttgctctttgtattctgaccagagttttttttgtttttttttactttaagttctgggatacatgtgcagaacgtscaggtttgttacataggtatacatgtgccatggtggtttgccgcacctatcaacccatcatctaggttttaagccccacatgcattaggtatttgtcctaatgctctccctccccttgtcccccatcccccaataggccccagtgtgtgatgttcccctccctgtgtccatgtgttctcattgttcaactcccacttgtgagtgaaaacacgcagtgtttggttttctgttcctttgttagtttgcctagaatgatggcttccagcttcatccatgtccctgcaaaggacacgaactcattctttttatggctgcatggtattccatggtgcatacagtatccagtctatcacagtatccagtctatcactgatgggcatttggattggttccaagtctttgctgttgtaaatagtactgcaataaacatgtgtgcatgtgtctttataaagtagaatgatttaaaatcctttgggtacataccccgtaatgggattgctgggtcaaatgcttttctggttctagattcttgagaaattgccacactgtcttcgcagtggttgaactaattgacactcccaccaacagtgtaaaagcattcctgtttctccacagccttgctagcatctgttgtttcctgacttcttaataattgccattctaactgatataagatggtatctcattgtggtttttatttgcatttttctaatgaccagtgatgatgacctttttttcgtatgtttgttggctgcataaatttttaagaagtgtctgttcatatccttcacccactttttgatgaggttgtttgtttttttcttgtaaatttgtttaagttccttgtagattctggatactagccctttgtcagacgggtagattgcaaaaattttctcccattctgtaggttgcctctttactctggtggtagtttcttttgctgtgagaagctctttagtttaattagattccatttgtcaattttggcttttgttgcagttgcttttgatgttttagtcatgaagtctttgcctatgcctgtgtcctgaatggtattgcctacgtttttttctagggtttttatggttttgggttttacatttaagtctttaatccatcttgagttagtttttatataaggtgtaaggaaggggtccagtttctgttttctgcatatgaccagccagttttcccagtaccatttattagatagagaatcctttccccatttcttgtttttgtcaggtttgtcaaaaatcaaatggttgtagatgtgtggtgttatttctgaggtctctgttttgttccatgggtccacatatctgttttggtaacagtaccatgttgttttgattactgtagccttgtagtatagtttgaaatcaggtagtgtgatgtctccagctttgttctttttgcttaggattatcttggctatacaggctctcttttggttccatatgaaatttaatgtagttttttctaattctgaagaaagtcagtggtagcttgatgggaatagcattgaatctataaattactttgggcagcatggccattttcacgatattgattcttcctgtccatgagcatggaatttttttttccatttgtttgtgtcctctcttatttccttgagcagtggtttgtagttctccttgaagaggtccttcacatcccttgtaggttgtactcctaagtattttattctctttgtagcagttgtgaatgggagttgactcatgatttggctctctgcttgtctattactggtgtataggaaagcttgtgatttttgcacattgattttgtatcctgagactttgctgaagttgcttatcagcttaaggagtttttgggctgagacgatgtggttttctaaatatacaatcatgtcatctgtaaacagagacaatttgacttcctctcttcctatttgaataccctttatttatttcttttgcctgattgccctggcgagaacttccaacactatgttgaataggagtggtgagagagggcatccttgtcttgtgccagttttcaaatggaatgcttccagctttgcccattcagtatgatactggctgtgggtttgtcataaatagctcttattattttgagktatgtttcatcaatacctagtttattgagagttttcagcatgaagggctgttgaattttgtcaaaggccttttctgcgtctrttgaggtaatcatgtggtttttgtcattggttctgtttatgtgatggattaagtttattgatttgtgtatgttgaacccgccttgcatcccagggatgaagctgacttgatcgtggtggataagctttttgatgtgctgctggatttggtttgccagtattatattaaggattttcgtattgatgttcatcagggatattggcctgaaattttctttttttgttgtgtctctgccaggttttggcatcaggatgatgctggcttcataaaatgggttacaggactccctctttttctgttgtttggaataattttagaaggaatggttctagctcctctttgtacctctggtagaatttggctgtgaatctgtctggtcctgggcttttttggttggtaggctattgattactgtctcaacttcagaacttgttattggtctattcagggattggacttcttcctggtttagtcttgggagggcgtatatgtccaggaatttatccatttcttctagattttctcgttcatttgcgtagaggtgtttatgcttttctctgatggtagtttgtatttctatgggatctgtggtgatatccctttatcattttttattgtgtctatttgattcttctctcttttcttctttattagtctagctagcggcctatttgttaatcttttcaaaaaaccagctcctggattcattgatttttttcaagggttttttgtgtctctatttccttcagttctgctctgatcttagttatttcttgtcttctgctagcttttgaatttgtttgctcttgcttctctagttcttttaattgtgatgttagggtgtcaatttgagatctttcctgctttctgatgtgggcatttagtgctataaacttccctcttaacactgctttagctgtgtctgaccatatttttaagttataattgtttagagagataggttgtagtcaatttatttcatcttggacagctagagaaataaagtggtttaattattaatatttcttttgactctcaaaagtgtcccagcttggatagttcattacataattacacacaaaggtttctgactaatttcatgagtcttagtgttgatcttcatgaaactaataataaattgacacttaagaatattcatgttttggtgtcatgatttgctactccagttcttatttatttggtactccgctggtggtagtcagggtatatacygttcttgaatgatttagttaattgtgatatacacttttttcctgaagactagaaaaaagtgtgctgtccccaaaagtaatctgcgtctcttaattttcttccttttacaaattactttccttggaaattagcatctttatacagagtggtctcttaaatcagaatgttctaacaaagaatattttccccttatgagctataagcaattaggtattgctgttatagtacaactaactaacatttttaagacatctgagttaygctaacccttctgttaggtttctgggtttttttcaacttatttgtggagtatattgtgaatgtcaagattagggcagccagagattttcttattctgctggaaatgtacttctcaggaaagacaatgatttaacaaccccagtggtcaaagtcttcatcttacaaatgggtgtactgtgtccctcaacagtgcaggcatatcatctaatccacctgctctttattcctcccaatgtgtattagctttgtttaagtgattgaggcatatgagcctgcataaatcattatgttacttagtaatttatttatctcactgctgaattgaaggtgatacaggctcaaggtgaaggatctttagcttcctgttgttctcctttcatcaagttattccttacccctatacccctctcaccctccccattggattcatgtggttttctttattttcctttcttttcctccaatagtttagaatctatacattctgtttttattattttagtggtttaccttatattttttacatgaaataaaaagttaggccaggtgtggtggctcmtgcctgtaatcctggcactttgggagactgaggcaggtggatcacttgaggccaggagttagagaccagcctggccaacatggtgaaatcctgtctctacaaaaaaattacaaacattacctgggtgtggtgctacacccctgtaatcccagctactcaggaggctgaggtaggagaattgcttgaacctgggagatggcggctgcagtgggctgagatggcaccactgcactccattctgggtgacagagcaagactctgtcttagaaaaaaaaaaaagaaagttaaacatttctcccctttttaggatacaagatccttagaaagtttactttaattctgcttattcccttcagatttatctttactattatctagtcttttgattcttttttcccaccccccccaaattagttgtcattactattttatgtgatcagtgccttaaatagccacatgctcaccaatttttttttttttttacttaattagatatacatgttggttggaaaaataaatgaccatagtaatagaatgtaagaaaataggctgggcgcagtggctcacacctataatccccacactttaagaggccaaggtgggcagatcacctgaggtcaagagttcaagaccagcctggccaacatggtgaaaccccatctccactgaaaatagaaaaattatctaggcgtggtgacacacacctgtaatcacagctgctaaggaggctgaggcaggacaattgcttgaacccaggaggcagaggctacagtgagccattgcaccactgcctgcgtgagagagcaagactccgtctaaaaaaacaataaataaataaaatgtaagaaaataaaccaggaatgcagtatagcttagcaagatgtctagagcaaatgccactaggccaggtgcagtggctcatgcctataatcctcgtactatgggaggctgagaagggaggatcgcttgagcttaggagttcgagaccagtctgggcaatatagcgagacctaatctctactaaatatcaaaaaaattagctgggtgtggtgatgcatgcctgtggtcccagttactcagttggctgaggcaggaggatcgcttgatcccaggagatcaaggcagcagtgagctgtgattataccactgccctccaacctgggtgacagagcaagaccttgtctcataaataaataaataacactaacaatgactgaaacatcatgaaatagatctggttgtcactggtatttaagtgttttcctatatctggttatattaatgtacttcaatagacagttacgccttcactatgcttccagcctcaagaggatctactggtatgcaacagaggaagagaagatacctgcctttaaggcagcctctactttatacatatgtgcacctttatgaatacaccatttagaagacstaatattgtcttgttgatttaaaaccaagaatgttagttgtgaataaaaacattttagaaatatttttcattccagtcacttttttccttctaagaacaagcttctattatgagtctcctatgggcacccatggtagaatacttttttttgttgttttttgagacaggatctcactctgtcacctaggctggagttgcagtggcgtgatcatggctcactgtagcctcaacctcgcaggctcaagtgatcctcccaactcagcctcctgaggatctgggactacaggtgcacacaccactatgcccagctaatttttctttttatttttgtagagacagagttttgccatgttgcctaggctggtcttgagaatawgttcttatatactgatttttgctgtatgctgttttatgttatttttattttggccattagcaaagcaaaaatgtatatatttatatttagatatatcatcatttctgtaattttaaagttgactttcatttaccaatgagcgaatgaaccacttttcaaaatgttcttacagttcacaacaactgatgtttgttgtgtgtttctctgagccagtactaagctaagtgtgacacatggtttatctcatttaattctctcaaacatcctgtaagttaggtgctattattaccctgattctaccagtgagtttattgaaatttagagaggcattgatgagttacagctgttcatttgacatctcacttctttaccagcattgaaactgtcaacataagattaaaacatttccttttttcttcctccctgccacccaccaaggaaattgagatgcctggaaaactgaaccaattttccatggtacattcaaggattaaaagacttggtggatttatagttgctaaagcctggaatgcggtccttattgagtcctgaacaggtttttcatgtaaaattgcttacgtgtcaggtgattctatttcatttctcttaggttatagaggaactgttcaaggctacaacaatgatggttctctcaaaatgtcctgaagatgttgaactctgtcacaaattcatagcacctggccaaaaggtaattagttttatggataaagcccaatacatctactgtttaatgtgttaattatacataatgaataaaattrtatttttaaaattttcttttttgtctttttattaaggacagattagaacatatgctaaaaaacaactttttaatgtaagtagatgttatactttttgaactttattcattatcactgtatttatcacactatattataattttttaaatttatatctgcttatatagatcctatatatataggatatatatatagacatattatatgtctatatatagacactccccagattccaggcaagacccatgttctaattatttttatagctcttgtgtttggttcatagttgataatcagtgtttcatcaataaattaataaatcatagcaagataaaatctagtaactattaactatgtaactataattcaaacttatactaactttagtcatcaaaatttggcttgatttaaaaaactgtaaaaaccatgctcagtgtaggttacaacaagacaagaattcaggaacagaaaactaagagattaccacagtgatctgcgtgagagttaatgatgatttggactgtgtattagagttctccagagaaacacgaccaaccacgtttgagggcggggtgtgtgtgtggagatagagagagagattgagagattattctaaagaattggctcacgtaattgtagatgcttgttgcatttaaagtctcggggtaggtggacaagctggagagtcaaggaagagttgccattcaagtccaaaggcagtctgctggcagaattccttctttctcaggaggagattagtctctgtcttagcaaaatcttcaactgattggatttagcccacccacattatgaagggtaatatgatctgcttttttcaaagtccactgatttagacattaatttcatccaaaaaacaccttcttagaagcattcagaatactatttgaccaaatatctggagaccatggcgcagccaagttgacacaaaattaaccatcacagaccaggatggtggcaagagttctcctattccgaatatattttagagatagaacaaacaggatttactgagggtgagagagaggagttaagggtgacttcaaggttttttttctcctacagctgcaaaaatgaagttgctattaactgaaattgggaaatgcttaagagagtattggggcaggagctttgagaggaaggggtggtatcgggaacacagacatgttaagattgagatgcttttcagatatccagccatagatgttggataggcaactgaaagtgtgggtctggagttttayaagacagtcttgggcatgagtatattgataaaagtggtcattaagtagatgaagaaagaagtaatttggccttctcaaggaatctctgctggtgacaaaacaaccagggaaggatcttagttttccagctcctatctaatgaaaagattcaaaatgcagaaataatattcaccatttgttgaatatttacccagacagtgataaaatttacatacatcagtagctcattttatcttcacaactccaagtagttattattctcattctacagatggagaatccctgcaaagaggttgagtaaaagatgaaatggtgattcaagctcatgttcatctgatttcaaagctcagacttttaacctgagattttcatatatttgggagggtactggaattaagggtagagtggttgtagctgccccactatcattacgactcttacatgtcacttaactcttgtgctttggagtccttgtccataaaatgttaaggttggaaaatgtcctcttgggctgcgccatttcaatcattgtcattgtcataatccattctgcatactacaaatcatagttgcagtttaaatttgtggggagagggacatcagcaagatgatgaatagagggtcccagccttcaccacagaaagtccatttggcaactagtcacatacaagaacacctttttgaaaatcccaaaatttgggaatgaaattgagacacgcagatggaccacagagcaaaaagtgcattagaagggtaggagcaatggtctcagtttgactgaatcctcccttccctaagtaggcacaataccacacacagaagattccccttggcacacagttaatgcagtggaaaaagagacagctatccagtttccccagcattctgtgatgcttcctaggaggcccattcctgtctcacagggaaccctgggggtaaggcctagactaccaggggtcaagtaggaacaaaggagtggggcagtgctcacagcaaccagtacacggatcttagtcatagctgtgttcctgccagcagtagcacctgatcagagataccagccagtggcatagcccatttacaaagcctagctggttgctgcagaagctcagtaggaaagtctatctggtttgagcccctacagggcagccaccccacctagcctcagcatccacccccatgctttgctcaggcaggcagacatcacaaatgttttacatttgtgtaagatacagatggccaataggtttatcaaaaagtgtccaacatcactaatcaataaaatgcaaattaaaaccgcactgagataaccactcacacctgttagaatggctgttatcaaaaagtagaatgagacacgttggctcatgcctgtagtctcagcactttgggaggctgaggtgggaggatcacttgaacccaggagttcaggaccaccctggccaacttagtgagaccctgtctctacaaaaaataaataaataaattagtcaggtgtggtgacatgtgcctgtagtgccagctactcaggagactaaggtgggaggattgcctaagcccaggaggttgagttttcagtgagctatgatcacagacgctgctgcactccagcctgggagacagagcaagaccttgtctcaaaaaaaaaaaaaaaaaaaaaaaaaaaaaagtcaaatgataacaggtgttggcaaagatgtggcgcttgggaacccttttataactgttagtggcaatgtaaattagtagagctattatggaggatagtatgggaggtttctcaaaaaaccaaaagtatatttaccatatgattcagccatcctacctctgggtacatatgcagaactgaagtcagtatgtcaaagagatatctgcacttacatgttctttgcagcactattcatagtagccaagatatggaatcaacctaagtgtccatcagtaggtgactggataaagtaaatgtgtatatatatacacagtggaatactattcaaaggaaatcttatttgtgacagcatggatcaacctggaagacttaatgctaagtgaaagaagctaggcacagaaagacaaatactgcatgattcactttgatgtgaaatgtaataaagttaacactacagaagtagtgagtagaatggtagttaccagtggccggtgaggggttcttgaagggaatggaaagaaattgtccaaggggtacaaagtttcagttagaccagaggaataagtgttcaggatttattgcataacaaagtgaccataattaattgtaatgtatatctcaaaattgctaaaggagtagattttaaatcttctcactrcaaaaaaaaaagtgaagcatgtgagacgatagatatgttaattaccttgatatattcatcccacagtgtataataccaaaaacacattgtatcctgtaaatacataaaatatttgtcaattaaaaattcagacatttttaaataaatgtatatgtgtgattatttgattggtatctactacctctgtgatgtcagaggctatgtttaaattgcttactcttatacccccaggacttagcccagtgcctttaacaggaactcagtaaatactgagtaattgagtggacaaacaagtgacttgagtaactgtggctgtaaaggtattctttaggstggatcctctcctgaggtttcttattggctaatatcactatttatttcagtcactgagggtagtgaaccatgattcagaaaacctggattctaatcctggccctaccatttactagccattaatgagtaaattattattttttaacaaatatttattgactgcctaatatgagttaggcactttgctagttcttgagaataatgaaaacaaacattgatttatttttttatggagttgaaaatctagagaaaaagatgaacagttaaatatttatatgaataatgtaattacgactatgaacttgattaatagtgaatctttaacttttctgaacttcagtttcctcatctataaaaaaatactctgccttatattgttgaaaggatttaatgacaatactgttaaaagcaatatgtcagactaggtaatttgaaaacmctctttctgcaaaacatctaaaaataatacttaaaatattataagattcttttaaatacgttgttgaattcactagaaagtaggagaagttccaggtgctagaaatgaagaaggaaccaaacaccagagtgatatggacagttggtgtgatgctgaggattctcagggtgtagggtagggaagctggagggcgattttccagtttttgaaaccagagattttaacagcaatgagatgacatgagaatagacgtagcagaatgaattagaatcaagatatcccctgaaatgcatgcacagatatacacacaaagctagaactggtcaaggactacacccttaatgaaagggccaattagaaaataagcaaacaaacagaaaattgagctagccagcatagagaatttacaaagaagtgtagaagtatatctgctttagcctgggcttaaggatagagacaaaacagaaatagtcttcattgagaatttgcagccacagttggcccttaagtgagcctagagtttgaatttatgtttcctgtgtagttcaagaatcttcatgccagggcattaaaataaaaaattgtcttcagttggtgataatgctggagtagctatagaaatcaatataaaaccaaacttgaagtttgtaccctcaacccaagtggcatgatattctcaaaacaaactctactgaagataatctcacactccaaatacacagggaaatacctaccatgagcaagaacagcagacataacaaacagcattagattcccaagaagttcaaagaacagtaatgacaatagattgataaaatagtatcttcacatagttgaaagaaaatacctgttaccttagaactgaaatactgggcagcaataacttgtaaaactggagaggcacgttgatagttgaaatgttagtccttttgttgtttgaaaggaagagagagaaactggtgaactttagactttttgtttttaagagacaggaccttgctgtgttttccaggctggagggcagtggtgtgatcatagctcactgcagccttgaactcctgggctsaagcaatcctcctgcctcagcctcccgagtaactgagacaactggtgcaggccaccacacccggctgctttagactgttaagtcagatatgcatgttaaaatgtgcggggtagccactgaaagcataatgagatggtgctggtctgatgacagtgattattaagtcatcaacatcagaggtatcaagttgagaaatagattgtgtggtggtgccctctctaccactttggcatcacctttctgctgttwcatgccttttaaggcattggcactgaaacttctgaaaatactggtgtagctgaatctactattgagttaatcctaaaaacagtaaagagaaaagaaaaaacagggagatggcgaaagagaaactgttgtcctttatgcagactgcactgttagttattgaatctgtatagataccatgtgacttgtattcttttgagtagatttcagtgtatttttcactacctgttacaattattttatatgaaaatgtgctgtttcagcaactcgtgtagtaatggaatttagcctttatgcagaaattgtattcagtttattttacatttcctttatattattatggttctgaaartgtagagtacttaccttttttatttgctcttcatttatctttgtgtgtgaatttgaggcgaaggatgacaataattatctttgtagttgagcaattttactcttaacagcttcagaataatgaattttctttattcagcaatgaaaaatgtggaatatgaaggtagtttgatgctgtatcattctctaccacagtgttttttcctcctttcctcaaagtactttggaaacagtttctggaaaggagaagagatattattttctatacatatcaagaaaaatacttaatagagttgatggaagccattaaggatatcaaatgtcagaactgtaatttgaacttgaaagttctgcctctaatgaaggtattggggagtggagtggaagacgtggaataacaggagatatttagacatgagagtcatttcttaataatgaaacagtaacataccaatggtacaaaatcttactgcttattattttgactgctctcatatttctcagtgtgattggtagatgataccaagtaattgatataatagaacaatagaatgcctaagcagaaaagaactttatgtggcacatatacaccatggaatactatgcagccataaaaaatgatgagttcatgtcctttgtagggacgtggatgaaattggaaatcatcattctcagtaaactatcgcaagaacaaaaaaccaaacaccgcatattctcactcataggtgggaattgaacaatgagatcacatggacacaggaaggggaacatcacactctggggactgtggtggggtggggggaggggggagggatagcattgggagatgtacgtaatgctagatgacgagttagtgggtgcagcgcaccagcatggcacatgtatacatatgtaactaacctgcacaatgtgcacatgtaccctaaaacttaaagtataataataaaagaaaaaaaagaaaaaaaaagatagttcaatctccttattttacaagtgcaaatacttaatttttaaatgtttgtataatacattacaaaaattaataacatgctttcactacgttgaagtgacttacatagctagtagtagaatcagatgaagtggtagaatcagttgagcccattttcttttgttttgatggaacatatgaaactctaagtgtttcagtcattatcttagccgttaaaagcttatactctggagtcagcagatcaagatttactatttacttacatgagtaacctttggaaagttattgatcctctytaaccttctgcttcccttctgtaaaatgctaattttaaaatcgttattactgctactaccaacaccactgccaccaccattattaccttagaaattacctattgttattactagattttaatttgaatagattcttaggaaaaaacctgtctttcaaaacatagctttaggggctttattgtactgtatgacacaatacaactctttctggttagttgttatggatatgaacttcatttttgcttcagagaacaagtttgtgctggataaattattttttgagctcaaggtctttcaggaagtttgtagatttttttgtaaaaaaaaaaaaaaaaaaaaaatccaaaatactgatgcagtattttacctgtaatttacaagcaacctgacactttcatgttactggtgggtataaattgatataaaagggggcaatatctttggcaaaacctttcagaaaatataaaaattgcaaattttcatctaataattccacttttgcatgtgaaaaatcagtgtataataactttgtaatattaaataggtatatataggcatgttttataatagcaaaagattagaacgtgaaatatcaggtcactggttaactaattatgacacatccacaaaatagaatattatgtaatacaaaaagtgaagaatgtcttcatatacacacagatctgcaaggtatattagtaaaattaggtgtgaaagagtgtgtatgttatgtatgacatctgtaaaaaaggaagattgtgtattatttacattatctgtataaataaaatcctctagagggatgttcacaataccaataacagtgattgtgtgaaaggaaaggaactaggtttctctggaaccgcaatggaagggagatgtatactcttatacatcttgattttttttaaaactatgtagacaagttacctattcacatagttaaattaaaacaaatacttgctttgacttactttaggcatgagggtgtctcatggagagaatcagtattttcctacatagtcttataatgcttagaatatattaccaggcccttactatgacctgaaagagtccatgtgatctgacttctgactgcctttcctatgtaatttcctgtgcattcttcctcttgttcagtatgctctagtcacgctgactgccctttttgttctgtgaacaagccaaactgtttctcacttcaggtccttgtacttgctgttccttttgcctggaatactcctcccaagatacttctatggttcatttccttactcggtgcacgcttctgttcaaatgtcacaaacttaggcctttcttgaccatcatatctaaaatggcaccccaaaycccctctgccttcttattccactttatttttcttcatagcacgaatagctacttgtttatttatctgtctactctctcctcacctgcatctctcgctctctctctctctgacacacacatgcgcgcacgcacattgtctccatgaaggctgagctttatttttatctccagtgcctagaattgtgtgtagtgcctagtaggtgccaagtatatgtctgttggataaataaatgaattaatggtgaattttaggaaaaagtattttgctgttgtagtcttttaatagggcattggcatatcatggattcagagaataatctttacttgcttaagtgactagcttcactgtgtatattgcaagtagatgaggagttgaggttattgaatggttacttgtcttcaggcagatcakwctttcataggattagatcagccttaattcctgattattcatgacctcacagtgtgatataggagtacgctttttctggttttaaaatgaactagttagcagctccattgtattgacttttctctgcttgtatcctgttttcctccagcatttcttatactgaagcagtggagatcttaaagcaagcatcccagaasttcacctttaccccagaggtagtattttgtgtgtatgtatatatgtgtgtgtgaaaatgcttccttcttgtctttagcttactgtgttaagaatctttcaaaatcatcttaattctcttattagcaaaatayggcatttgctcatttgtacacagacttaagattttgatgtttgctgaatcttgttgagatacttaaaacggaattaattaagaataaaaataaattttatcatttggaatagcagtgactaaagggttataaaggagtctcccacgtttaggaagatgaaaattctaaaaaagaaagataatcatagactattactgtagagaccaggtgttggggctcacgcctataattccagcactttgggaggccaaggcaggcagattgcttgagccccaaagttcaagaccagcctgggcaatacagtgagaccctgtctctacccaaaaaaaaaaaaaaaaaagtgaatttttaaaaaaagaatattactgtaaaagtcaactagttctgtgttttccaaaatatattctgaatgacattaaaagatgaccaggctgggtgcggtggctcacacctgtaatcccagtactttgggaggctgaggcgggtggatcacaaggtcaggagatcgagaccatcctggctaacatggtgaaaccccgtctctactaaaaatacaaaaaattagctgggtgaggtggcgggcgcctgtagtcccagctactcaggaggctgaggcaggagaatggcatgaacccggggggcagagtctgcagtgagcagagatcaccactgcattccagcctcggcaacagcgagactccatctcaaaaaaaaaaaaaaagatgaccaacaaaagaagttatattatcaaataagtttaggcaacataactaaacaggtgtgtttttctttttcttttttttcttttttttttttttttttcagatttagtgcttgcagaagcaggtttgtttttcagttgaactttacggagccttttagtttatgagccactctggaaaatactggggtttttttgtttgttttgcttttaaagaactttatatttaagagatggaggtctcgttatgatgcctgagctcatcttgaactcctaggctcaagggatccgccacttcagcctgccaagtaactgggactagaggagcatgcctcagtacccagccaagaattcttttttttttttttttttcaatacttacttgataaacaaagattgtataggccgggtgtggtagttcacacctgtaatcccaacactttaagaggccaaggtaggattgcttgagcccaggagtttaaaattgcagtgagccatgatcgactacagccctccagcctaggtgacagagaaagaccttgtctcgaagaacaacaacaaaagaagattgtatatattcagggtatacgacatgatgatttgatacatgtatacattgtgtaacagattatcataatcaaattagttaacacatctgtcattacccacactgtacattagatccccagaacttgttcatcttataactgaaagtgtatacactttgacaaatatcacctcatttgccccattcccagacccctgacaaccactgtacaactctctctttctgtgaaggaactcctttgtttattttttattgtatttaattaattaattaatttatttatttatttatttatttattttttgaaagacaagatctctctgtgttgccgaggctggagtgcagtggtgcaaacatggctcactgcagattccacctcccaggctctcatcattcctcccaactcagtctcccaactatctgggactacaggtgcgtgccaccaggtctggctgatttttttattttttgtagagacagggttatgttgcctaggctagtctcgggcttctgtgctcaagcactcctcggcttcccaaggtgctgggattaaaggcatgagccaccatgcctggccagagcttttttattttattggcaatgatataggtccagagagaccacatggtctgtcaatggacatatgtataatgttggaggcaaaactcttttcctattccagttattttttcctgtaactaagatactgccaaacaagtggtagtaataagataatgttaacctttgtgtttaaactattccttgtaccggttcaatcccaattaagtcagatctttatgtattacaaaagtaacctctgtttgttatatttatgatcaattctttgtgtaagttttcatttctttttctcctaaccctggaagcttcatgaagtcagggattataactttttcttaccactatatccagtatatcatatggtacctggaatttaataggcacattagtatttgcttaataaatatattgaacagagttaataaatattcatcaaagagcatctcatacatgagttgactctttttatttaaaaagaagtcaccggccatcactgtggctcacacctgtaatcccagcactttgggaggccaaggtgggcagatcacgaaatcaggagttcaagaccagcctggccaacgtagtgaaaccccatctctactgaaaatacaaaaaaaatagccgggcatggtggcgggcacctgaagtcccagttacttgggaggctgaggcaggagaatcacttgaacccrggagacagaggttgcagtgagccgagattgcaccactgcactctagcctgggcgacacagccagactctgtctcaaaaaaaacaaaagtcaccaagagaagtcatttagccaaagataggctcaatattaggaatattatcttctatcatttaatttcctgagacttaggaacaataacgtggaagaagctgtaggcactattaaaaattgtgattctgaagtcaggtttttttttttatctccttgtaaagtagactttgttttcctgcaggtgctgtattgtctgctcctggggggtgggggtgggggagcaatggggacacagtaagcatagtgtctatctactggcctcagctttcatctttccaggcctgtaggtgttcttgttaacaaatatctctctcttgtttagtcagctgtgtaaccttagcagctagctccacacatggagcctcaggaagatraagcccttagaaytgatgcaggttattttcagctgcttaattgtatatttcacctctgtctcctcttttggtcatttctttcttctcattacagtggggtgctgacctacggactgaacatgaaaagtacctggtgaagcactgtggcaacatacctgtcttcgttattaattatccattaacactcaagcctttctacatgagggataatgaagatggccctcagcacacggtaagaagagatactaaataaattggggttagtcctcttaggttgggtttttcatttagcctttgtgatcttttcttaaatgtcatctatcactctatctcttaaaatgataaygtttttcaaagacatctcttaaaaatttttcccaaagaagatcccagtgttctataaacgtacttcctcatttctgtcacaaggtcttcttcttagtttagcaggtgcaaatctaggttttctttgtttcgttttgttatgtttcattttgttttgttttgttttgtaatgactgagaggaagtggcctagaacactgtatggctataccaagcttgttagtctgtggtgaagtactggttaggagactcctaggagggaaggcatactgggcaagagatgagagcagtggcactgagaggtgacagcgtgctggtagccctcacagccctctctcgctctcggcgcctcctcggccttggcgcccactttggcggcacttgaggagcccttcagcctgccactgcactgtgggagcccctttctgggctggccaaggccggagccggctccctcagcttgtggggtggtgtggagggagaggcatgggcgggaaccagggctgcctgcggtgcttgcgggccagtgcgagttccaggtgggtgtgggctcggcgggccccacctgctccgggcagtgaggggcttagcacctgggccagcagcagctgtgctcaatttcctgccaggccttagctgccttcccgtggggcagggctcgggacctgcagccccccatgcctgagcctccccacccctccgtgggctcctgtgtcgctgaagcctccctgacgagcgccgccccctgctccacggcgcccagtcccattgaccacccaagggctgaggagtgcaggcgcatggcgcgggactggcaggcaggtccacctgcagccccagtgtgggatccactgggtgaagccagctgggctcctgagtctggtggggacgtggagaacctttatgtctagctaagagattgtaaatacaccaatyggcactctgtatctagctcaaggtttgtaaacacaccaaacagcaccctctgtctagctcagggtttgtgaatgcaccagtggacactctgtttctagctactctgatggggacttggagaacctttrtgtctagctaagggattgtaaatacaccaatcagcactctatctagctcaaggtttgaaaacacaccaatcagcaccctgtgtctagctcagggttgtgaatgcaccagtggacactgtctagctactctggtggggacttggagaacctttgtgtggacactctgtatctagctaatctggtggggacgtggagaacctttgtgtctagctcagggactgtaaatgtaccaatcagcgccctgtcaaaacagaccactctgctctaccaatcagcaggatgtgggtggggccagataagagaataaaagcaggctgcccgagccagcagtagcaacccgctcgggtccccttccacactgtggaagttttgttctttcgctctttgcaataaatcttgctcctgctcactctttgggtccacactgcctttatgagctgtaacactcaccgcgaagatctgcagcttcactcctgaagccagcgagcccacgagcccaccgggaggaatgaagaactccagacacgccgcctaaagagctgttaacactcaccgcgaaggtctgcagcttcactcctgagccagccagaccacgaacccaccagaaggaagaaactccaaacacatccgaacatcagaaggaacaaactccggacgcgccgcctttaagaactgtaacactcaccgtgagggtccgcggcttcattgttgaagtcagtgagaccaagaacccaccaattccggacactgcacaatcaggcaaaggaaaagctggcttggcagagcaggaggaggcttagactgctttggtttggactatcaaatagaaatagtgaggggagggctatgaagggatacaggcagtctaggcagattttccctgtctcagctcttgtctgaccgtctcttctctgtctgcctgttttgtctctctcatccctttaccgtttcttgtcctgtgggtttttttttttttttttttttttttgaccttaactatagttgtcttttttttgagatagaatttcactcttgtcacccaggctggggtgcaatggcgtgatctcagctcactgcaacctctgcctcccaggttcaagtgattttcctgcctcagcctcccaagtagctgggattataggcgtgtgccgccacacccatcagatttttgtatttttagtagagacagggtttcaccatgttggccaggctggtctttaactcctgacctcaggtagtctgccctcctcagcctcccaaagtgcttggattacaggcgtgagccactgcacctggcctgccttttttattcttttggtttttacaaaattagctataacatggccaggtatagtggctcacgtttgtaatcctagcactttggtagtccaaggtgggaaaattgcttgagaccaggaattcaagaccagcctgttgaacataggaagaccctatctcaacaaaaaataaattagccaggtgtagtggtgtgcacctgtagtctatctactcaagaggctgaggtgagagaattactggagcctaggaactsgaggcttcagtgagccataatggtgtcactgtgctccagcctgggcgacagagggagccccctatgtgaaaaacaaataattaaattttaaagttggcaataatataaagtaagaatatattttacttttctaaatatttattgaatagttatatatgtaatattattagttgtaaaagtctatgagacagattatattgatttcaaaataggcccaaaaactacactttactgtctgatgcttttcacttatttgtggataaatatacaaaaatgtagattagggcccactagtaaacagaatgtccctgtcaggtatacagggttatctgtttgactgtatttcctgttttttcattttgtattaatacagctgtattagccaccgtttactagatgcttaggaatcaagcactaccatctcatctctaaatccagaaacaactttgcttagaagcttgtttccccattttataaatgaaaaactggagtgcagagatagattgcatttccaaagctacgtagatagtaagtagttagtattcactcctgattctctttagctttaaagtgtatttttaaaatatatgtatttttttctagactgcagactgttttataaagtctgtgtttttttccacttcttccaactgcctaaaaatcacaaataatataaaattactttttagccatttattttactcatcctcacctttcacacaaaatcatccaaaactagtgagcaacataattgatgtatgattcttatattytcttttttctaccaaccctctagtgtaattggcccccaggttgccagcaaaaaggagacattaggacctagattatctagtcctacataatttagtattgagcctatattacaaaacagaagactgtatctgttggctttttttcatcactccagcccattccaattccagctccccctccaacacacacaccatgtatttttctcatttaatttccctagattaagcatctttcagtcactcaattttgtacttaagtactttgcttaagaattttcttctctataaagatttttctgggttacccagctactttgagccttccttttttggatttttgttgcgaattagcgaaactatagcattgtgtctatattctgyaatctcttaatgagttttgctttctttcttttcttttttttaaaagacggaatcttgctctgtcttccaggctggagtgcaatggcacgatcttggctcattgcaccctctgtctcccgggttcaagcaattctcctgcctcagcctcccgagtagctgggactacagacgcatgccaccacacccggctaattttttttttttttttttttgtagtgggtacgggatttcacagtgttgcccaggctggtctcaaactgagctcaggcagtccatccgcctcagcctcctaaagtgtttggattacaggcatgaaagtttgctttcctaaacaaaactgaacaactttaggatgggtattgaatttttttttttttttttttttttttttttaccagcacagcatctcccactcattctatactcctacttctttgtagtttccacccctatcacaccgttgaagtagctcttgttaggatcagtaatgatcttcatgttattaaatccagcagacttttaagtctttattttacttggccggtcagtgctaatcagcactattaatgacttttttattcttataaccctctactcccttgacttctgtgacatcacattatccctgtttttctcctttctcagcatttattctttcttagtctcctgtacagatttatccatttctatctattcatcaggtgttggaattcctcaaggcccagtccttggtggtctttattttcctcatgttatttcatctgtatctattgcttactgtttattctctcagaagtttttatctctaatccagacttcttctctgagctctagactcatatacattcgtccctcagtatcctcagggattggttccaggacaccctacccactagccccctctcagatagcaaaattcgaggataytaatgagtcccttatgtaaaatgacgtagtatgcgtatcacctatgcacatcctcctgtatactttaaataatttataggttacttataatacctaatacaatgtaaatgctgtgtaaatagttgttatgctgtattgtttagggaaataatggcaagaaaaaaatctgtacatgttagttacagatacaaccatctatttgtttttcctgaatattttaaatctgctgttggttgaatccacaaatgcagaacctctgaatacagagggctgactcattgactgcctcattgactgccatttacatatctcaaaggcatctcaaacacaacacatccaaaactgaacctatgatttctcctctcctcccagcaaatttgatcttctttcaatattctgtattcatctaattgtacatgccagatacctgagtcatctcagaagtcttcctttctcatttcctccattgactaagttctgtcagttttgcgctcctaaatatctctcacatccattcatttctcttcatttcctcttttaccttttcagattaagatactgcctagactaatagcctcctaactgatcttcatatatccattctttcctcttctgaatcagttctcccattttagtgtgagtttttataaaatgtaaatcctggctgggcacagttgctcatgcctgtaatccctgcactttgggagcctgaggtgcacagatcacttgatcccaggagttccggaccagcctggacagcataatgagactccatcyccattaaaaaaaaaaaaaaattaacccaatcatgttgtcactcttcttaaagccattcagtggcctccctttgctcytaggataaaagccaaaatcctttatgtcgcctacaatgcctagtagaatgtggctgtgtctccttctctagtctgttatactgtgggactccactttgttctctcctatcaccacccttcttctgtgtcttcagacgtgcagttctttctctcacctcagactctgcgtatattattccttcaatctagaacagtcttcttcatctaaataattttgcttactgatgtttatactcaatcaccatttcctcagagaaacctttcttgaccctctagtctgagtcagaggcccctgttagatgctgcagtcgtaccatgttaagtttcacacccagagatactaactcttaatccatcataacctttaacagttgtaattttacatctatgtgcatgactatttaattaatgacactttcctctatgtcaaaagacgtgaggacttccatgttagtccattttcatgctgctgataaagacatacccaagacgggaaagaagaagaggtttaatggactcacagttccacatggctggggaggcctcacagtcatggcagaaagtgaaaggcacttcttacatggcagcagcaagagagaatgagagagaagtgaaagcggaaacacctcataaaaccatcagatcggctgggcgcggtggctcactcctgtaatcccagcactttgggaggccgaggcgggtggatcacctgaggcaggggattcaagaccagcctgaccaacatggagaaaccccgtctctactaaaaatacaaaattagctgggcgtggtggtacacacctgtaatcccagctacttgggaggcttaggcaggagaatcgcttgaacccgagaggcagaggttgcagtgagccgagattgcatcattgtactccagcctgggcaacaagagcaaaactctgtctcaatttaaaaaaaacaaacaaaacaaaacaaaaaaaaaacaacgacaaaaaaaaccaccatcagatcatcagattgaccggcgccgtggctcatgcttgtaatcccagcactttgggaggtcaaggctggtggatcacctgaggtcaggagttcgagaccagcctgaccaacaaggtgaaaccccgtctttactaaaaatacaaaaagtagccaggcatggtggcaggcacctgtagtcccagctcgggaggctgagacaggagaattgcttgaacccagtaggcagagttgcagtaagctgagatcacaccactgcagtccagccggggcaacagagcgagactccatctcaaaaaaamaaacaaacaaacaaaaaaaaaacccaccatcagatctccttagacttactaccacaagaacagtatggggaaaatatccccatgattcagttatctcccacaacaagtgggaattatggaagtacaattcaagatgagatttgggtggggacacccagcaaaaccatatcaacttctttttcattcatcrgtatattcctagtgtaatgcctgggacgtggtggacacctagtatccgtgtggtggatggatgaatggattaatgaatcaaatccaacaaagtttaagacacactgtcgacgagtagtgagttgatctgctgtgaatttgctgggaagctaaaaagcatctttaattttgtgagtggtagcaacatagcataaaggaaagtctagtggctatagagttagacactcttgggttcaagtccccaccccacctctgtgtattataaactatgtgattttacatatgccacctaatctttttgtgtcttaatttcctgatctgtaaaaatgagaccataatatattatggagttgtgaggattaaatcaagtaatataagaaaagtagatagctgtgttttaggaagtaggtagtcaataggtatgaagttgtctcttcctactttctaaattttaataaaatttttcccctttcatrtttagttgacatgtaataattgtatgtatttatggaatatagaatggtattttggtgtatgtatataatactgatcaaattagggtaattagcatattcgtcacctcaaacatttttcatttctttgtgttgtgaacattcaaaatcctctcatccacctttttgaaaatatacaataaattgtagttaaccgtattcaccctatattgctgcagaataccagcactcattcctcctatctagctataattttgtatctactaaccaacctctccccacccttccaagcccccgttacacactgttctactatttcccatgagctcaaaaaatgttttattcccacatatgaatgagaacatgcaatatttatctgtgcctgactttaaattttgataaaatcttatgataaagtacaatgtgtgtgtgtgtgtttgtgtgtgtgtgtgtgtgtgtgtgtgtgtgttgttacataataacataagattccttaaaaggtagttctctcatagatcgcactcacaagtatcttaccttcaacagtactgggaaaccttcattatgacacagtctctctagtaatgtggtctcacaccctaaaggcgttatactgggactttaacatacttccataatttatgcagtactagagtatatagcttctcagagctaaactattcaaatataatttatttaaacttgttacwttagccatagagaataacattggtacattagcagtgtacatttcttttcaatccatttgtatgaagtgcctgcttctatccctcatttgttgttttctggtgaaggaagaagctttgggccagatgactaaattctgtttcttttagtagggctgtaataactggctgtaagttcgcaagagttcctgtaatggatgcagtgcagtcttgaaaaaaataagacaggtgtgtttcataggtgccttctttagggaaccaaaagagaaggatggggaaatatctaatctacacttgtaacttttggccagagggtaataaatagtaaaatggtatgtttttacagttataatttatcttcctttctccccacctctcagtagaaatgaaggtatgcgctgtggtgtactgaaaagtacacaggatgcagagtggttctgggtttgaaatctagataccttactagttacctgtgtcacctcaggcaagtctctgtgatctttcagcctcaatttctccctctgtataatcagagaattggattaagtgacctctaaagtattacctctctaagattctctgatttcctgtagcctaagtttttcttcatatgcatggataagactaacttataaattactgagcatatttgatcatttgaaagggacagatcatgggaaaatgaatctaagcaaatatgcaaaatgccatatgcctctgaggctggtctccaggtaagtccctcaaagccaggtggcagatgttcagctgggggagtggcttcacagagaagaatagtcttttattctacacacgtgtaattaggaaaaagtgactgcccctcagtccttgatgagatgccacaatcaccaggtagtgttctaattttcaaaattatatcagtattacttagcaaaccagagaaaggtcagcattagtgggcattcagtaaagtacatactgtgaagtcaactcagaaaggagaatactcagccaaggggtgtgcaataaatttcccagagctgtggctaattaaccaacctgcatcaaaatagctcgagccaccaaccaacagaaatagtgatgaagggaattgccaattttccccatatctaggactaaagagaatcctagaaatttttgtcaaaattgaaagtatccatttcagtctgtcgtaaaatactttgagattctttatcatgacatattttatattaatactttgaattgtagagttagggaacatagggaagagaaatccttttatgtgtgtgatacagacttctaaggttttgttaccaaactgtttctcccatttcagtcttcccagtgtgtcttaattgaacaagtttggttaaagcaactgagataaaagtgaacgtaaatgcctcctaagtcttttggtagagtaagagtgtcgaggaatcttcattattaaaagtagcaaggaaaagacatttagggagttgagaaattatttatattgtctcacttaactaaataagattaactttgtaagattagagattacttaaaacatggtagacagaggaaaatggaagaaaagattaacaaagattaaatttttgacgttccaaattgacatctattattgagtacccgtgtggcaagcataacrttaaaacattcaaaagagaaaacaataatgtttatckagtatgtgccgataattaacttttatccctttcttacagatgaggctgctacctctcagtgcagcagtatagtcactcatgcaaaatcacaccgctagcaggtattgaagctaggctgtaaaggcagaaatacagcatatatggcagcttcattagaatcctgatctttctgggagtgaagagtttgtgtggggtggcaggaagagctatggacttagagccaggagacttgggttttgttcctggatataccacttgatctttcttgtcctcagtattctcaggggatcatagtcaatctctggtgatagaggtcaggaaagaggttacttttggtaggggtagtaactaaaagaagaccttaggaggacttttttggggtactgctattgttcagtttattgatccgtatggtgcttcatggtgtgtttgtgaaaatttatagaactgtatactagttatttgtgtactttttacacatattttatactttaagtttactttaaaagggaattacacacttgtatcatcacaggtttgttgtggaaatcagatgaacaaatgtttttaaaattgctttaaaaattaaaattctatgctataaaaataatggagtaaggaattattgggtgataaagatggctagacaagataggaacaattatggagagattggagtgttacagatagcttgggctttatccagtaaaaaacagagaggcattgtatgtattctaagatactggcaagatgaaaaaattaacctgacatatagaatggattggggaaggggggaattaaagacacataagataattatgggacttttgcttataatctcaacagtgaaaatggagagaaagaaatgaacctaaaacattctgaaggaataaacagtggtctgtgtgttagtccattttactgaaatagagttgctctaagttgctataaaaaaatacctgagactggctgggcacggtggctcatgcttgtgatcccagcactttgggaggccaaggcaggcaaatcacaaggtcaggagttcgagaccagcctggccaacatggtgaaacctgtctctactaaaaatacgaaaaattagctgagcgtagtggcaggtgcctataatcccagctacttgggaggctgaggcaagagaatcgcttgaacccgggaggtggaggttgcagtgagccgagatcacgccactgcactccagcccaggcgacagaatgaggctacattaaaaaaaaaaaaaacacctgagacttggtaatttataaaacaaagagttttatttggctcgtggttctgcagactgtacaagaatggcatcaacttctcagcttctggtgtggcctcaggaagcttttactcatgacaaaaaggcaaagagggaacaggcatgtcacacagcaaaacagagagcaagaaagaagggaagcgatgtcagtctgttttaaacaaccagttctcatgtgaactaatagagcaagaagccattaccatcggaatggcacaacgccattcatgaggaggccacccccatgatccaacacctgcccctaggccccacctccaatattagagggtcacatttcaacgtgaatttgggagggcacaaatatccaaaccatatcagtctatgaaataaactagaaagaaaagataaggaagagagaagagtcacaagtcattcccataggtcatactttaattataaaaagtagagtggtgccgtttactgaaatgttgtcctctctcaagtggaggaactcataagtgaacctttgtggagttctcaactgatgttttcttctggttcacttgaaatttagagctcactaaggaaggaagcaatgtggtaaaacagtcttgaccatgagggaaagggaatacatgtttgggagcaaggtaagaatttcattcctttgaagccattagtmgtatctttgcaaaatgtaagacttttgcctctttcagacagcagcagtagtaaaactggctagccattatagtagccaaagtccattttcagtcattgttgcctgcagcccatctgcatctcttcaccatcacatctggaaagccctctttcctaattgtacctagtttgtttttagggccaaaatactgtgtatttcagcagttacagcaaaaaccacaaacatgtttcctatggtttgtggaacattctttttcttctgatactagtgtgtaaccttgccccattgttggtaacagcctgtgagaaactgaataaggaggcgttcaatttgtggttttcatcaatatttaaaaatactgagataggtgagaagagaggtggcagaggaagggccattaaactttttccctctttcagctttagcgtggacaaggttatgtattgtaagccttgttcctatctagcctatgttttttttttaattcagggtctgagttttattttcagtgcattgattggaatcaaagagtcagaagggagtgtcataaatagaaatcagggtttgttcagcttgaataccaacacaaactatttctagacagcatgccactgcagctgtgtgacttaagcagaatcaaaactcatattaactggaggaagatgtgtcagagagcattctgggcctacaagatgtacccaaagtggaattggttttgttaaggaatagaggaattagggaaagcttaggaaaatgatctgtagtctccattgttacctgtgtaggagagtaaaaggtcggcagagctaaactccttctgcttagttcaagcctcccaacgatgcacagaaacacaatagagatttttagttgcaaaagtgctcaaatttggtcaactttaaagaagttttgctctgcaaccagtgaattccttaatgatagatttagttctggttcctgttcattatgtaactcattactcccggtaaccgccagacctacagataaactatgtgtatcttctggtcctaccttcctttctctttgaattatatctttttccataaagtacagacgattgtccattcagaaggacttttaaaaattcaagtttatggctgatttttggctgtggttaattgaagttccaagaaaaagagtaatataggaaggctgaattatttggagggttcctatgccattatttatcatcttagaaataatcatagagctgggcatggtgactcatgcctgtcatcccaccactttgggaggtagaagcaggaagatcgcttgagccaaggagtttgagaccagtgtgggcaacaaattgagaccctgtctgtacaaaaaaaaataatattaacctggtgtggtaacctgtgcctgtaatcttagctactcagagaggctgagttaggaggattgcttgagcctgggaggtcaaggcggcattgagccacactcataccactgcactccagcctgagtggcagagtgagaccctgtctcaaaaataaaaaaaaaaatcggccagacacggtggctgacgcctgtaatcccagaactttaggaagccgaggcaggtggatcacaaggtcaagagatcgagaccagcctggccaacatggtgaaatcccttctctactaaaaatataaaaaattagctgagcatggtggcgagctcctgtagtcccagctactcgggaggctgaggcaggaaaatctcttgaacctgggaggcagaggttgcagtgagtgagatcgcaccactacactccagcctggcaacagagtgagactccatctcaaaaaaatttaaaaaaaaaattgaaaaatttaaaaaaagaatcatagttgaaactcataaataagtatgtgtttggtcatctaactaaaagatatggatacttcgtaacaggaagttcaaaagcttgcagctcatttcccagggcaaaggtgatgtgctccagcttgcttaagatgtgctctagagtccggctatttggagagcctggcatgcaacagccaaatgggcagaaaatgggtattgacggttgctcaatttcagagtcacctttgcagtactctaaaagcacactggaattggctggaagagccattagtagacaatcaatatctgagcttttgatagtgaccatggtctatatgattatttgtggtactttatctgtatttttcttgtagcacctaatgctttatggttagctatgataaaatctaatctctgctgtagcactttttatttattcatgaaccttccccactttccctaatcaaagttaattcctcctgtctttattgtccttggctctataagccagtctcagcctcccataaaccacagacctgcctgcccataaaggcaagttgtcatcacccgcaaatgccaactttcttgtttccaacctgcctgcactcttaaccggctcccaataacttgtgaaacacacaatcaagtttttgtcattacttctccaagaaatttgtgtaattgcctgtgtgtttgtattatatctttatgtaccttttatctctaggagaacccaggagaaagaggtagtttttctagtaactagcccagttgttatcagggggagatacaaggtagaagaattctacctggaatttcaatcctaactaaagagtgtgaaaatttgagggaattgttctagtgatctttagagaatgcagtatttttgatataccagaagaaagtacactctgtgtattcaaaatgtgtctttatttgtaattgaagaatactctgctgtattataacttctcagagagtgtgcagaatctttagctaggtaggaggatatagttataaaagaaaaacaggaagtattagaatctgatacggtggaagggaacctaaacctgaagtaaaagagaaaagaagaatgttacatggaggaagaaaagacaacaagggctgggcacagtggctcacgcctgtaatcccagcactttggaggcccaggtgggcagatcacttgaggtcaggagttagaggcctgcctgcccaacatggtgaaaccccatctctactacaaaaattaggtataaaaattagccaggcgtggtggcatgcatctgtaataccagctactcgggaggctgaggcaggagaatcacttgaacctgagaagcggaggttgcagtgagctgagatcacaccactgcattccagcctgggcgacacagtgagactcagtctcaggaaaaaaaaaaaaaaaaaaaaaaagacaaggcttttgtgggcttttcttcagaggttcacctgaccttgttgaaaaagaaatagtaccatttggtcctgaaataattatgagacattgtaaaggaatgctttgctcaaaagatacaggtatcttaagaggggaagcaactttgcactcttgtcaaggaaacatgtaggagactgaccactggagagaatgtgaattttcagaccatgtaggcaaagaaagaacaaagatgatatgtgttcctcctgcataccattaaattagtaccaagtaaagatatagtagtggtgtgggactgtatccagatgtcttctaaaatttttatcccgtgaaaatagcctattttggtaagttcttccatactgattcgtttatctcccagagtacagaggaagaaaataggagaactactgttcttcctttaattctaattaacattgaaggattgtttgggagggtggaagtttaagagtccacgtagatgaggaaaaagcaacatggaaaactgttttatgtgcacatatagtttgtgcttctccctcagtgggaattatgcttccccgtcccattaatgtgacctgagtcatatgacttgcattggtcgaggaatgtgagaagtgacatacatacgttgcttctgtacaaatgcttttagtacatagtcatacatgatctttttcccatctgccccaagaccaacagtaccctagaaagagattattctatcagttttagaccagggtggacatgtggcctgtgtttttaaaaggcctttcattgttttaaactagtggttctcaaccagggattattatgttcccctctttcttcaccaaggaacatttgtaatgtctggaaatgtttttggttgttacaacaaggggagtataactggcctatagtgggtagaggctagttatgcttctcaatatcccacagtgcacagttgaggcctccacaacaaagaagtatctagttaaaaatgttattaatgttgagattgagaaacctggttgtaagcttctggggttgtttgtgactatagcttagcctagcctatcctgactaatacaacaactttcaccttaattttatactaagtgcagcaatagttgtgtataaccagttaggtacactggaaattaggaaggcaagtttgggagaaaaaaaaatttttttttttaacgtagctatcctaccatggtataaggtttttaaggtgacttggccaggcgcggtggctcacgcctgtaatcccagcactttgggaggctgaggcaggcggatcacgaggtcaggagatccgagaccatcctggctaacgtggtgaaaccctgtctctactaaaaatacaaaaaaattagccgggcatggtggcaggtgcctgtagtcccagctactcgggaggctgaggcaggagaatagcatgaaccggggaggtggagtttgcagtgagccgagatcgcaccactgcactccagcctgggtgacagagcaagactccaactcaaaaaaaaaaaaaaaaaaaacattttttaggtgactcaaaaggtttagaaacttccagttacacaactataactgtgcagttgcagatattccagataaataaaagccagagagaaaagtcagtgtggttgcacagtgaactctctcctgaactcaaatattaaaggaagtttataatcaaaataaatatgagtcttttatattcctttaaacatagcattaaaagaattaagatccaaaattaacgtggtttagatctgcatgcaaagatacccagaggacttttgtttgttttagttatcttagcagcaagatccagcaacaagtacatctctcatttgatgctcatgaactgcatagagaaagcagaacatcttaccaaggattgcctcatcttcctcatcactggccaccagtctcatctggtctacctccttccggttattccatagtctctgattctccagcatctttttgaggcagtagacctttctaaccctggctttaacctttacatgtacttaaagtatcaaaagtgattactgccgggcacagtggttcacatctgtaatcccagcactttgggaggatgaggcgggtggatcacgaggtcaagacctcgtggttcaagatcaggtggttcaagaccagcctggccgacatagtgaaaccccgtctctactaaaaatacaaaaattagctgggcacggtggcatgtgcctgtaatcccagctactcgggaggctgaggcggaggttgcagtgagccaagatcgygccactgcactgcagcctggcctacagagcgagagtccgtctcaaaaaaaaaaaaaaagtgattactacccacccttgtcccatggaatcactcctattttgaagccttgaaaatgataggttttgaatatacctatcccttcttttttgttttgtttcgtctggttctgacaagtcattgtttcatatatataataagtatatgcaacattctaacgttatggggtataatgtactgttttgatatgtgtatacaatgtggtatgattaaatcaaactaattagcagatccttcacctgacttatctatcatttttatagtgagacatttgaaatttactcttagttattttaaaatatataatatgtattgttgactctagtcaccttgtatgtaataaatctcaaaatctattcttctgcctgaaattttgcaccttttgattaataactcattcccctgtctcccattcctctgtccatctgaaactttgtaccctttgatcagcaactcttcgttcccttccttcccactccagcctctggtaaccatcattctattatatatttctattcattcagcttattagattccatatgtaagtgaaattatgtggtatttgtctttctgtggttggcatatttcacttagcacattatcctctggattcatccatgtgtcacaagtgactggatttacccccttcttaaggctgaatagtattttattgtgtatatatatacacaatatttgtccattcatctgttgatgggcacgtaggttgtttctgtatctttactattgtgagtaatgctgcagtgaacattagagtgcagatatcaccaccaatatactgatttctattcttctggatatatatrcccagaagtgggattgctgaggtgtatgttctgtttttaggtttttgaggaacttccataccatttctcataatgacggtactaatttacattcccaccaacagtgtataagagttccttttctctgtatcctctccaaacttatttttcatcttttttataacagccattcaaagctgggcctgatggtggcatgtacctataatcccagctacttaggaggctgaggcaggagatcgcttgaacccaggagttcaagtccagcctgagcaacacagcaagaccccatctctatttaaaaatataaatgtaggaagaaaaaaaaaaacactaacaggtgtgaagtgataactcagtgtggttttatttttcattttcttaataattagtgattttgagcattttttcttgcacctgttagtcatttgtatgtttgtttgttttttttttgagaaatgtctgttcagttcctttacctttttttaatcacgttattttcttgttgagttgtatgagttccttatgtattttgggtattaaccccttataagatgtatggtttgcaaatattttctcccattctttgagttgtctcttcactttgttaattgtttcctttgctgtgcagaaactttttagtttgatactgtctcatttgtctggttttgcattggttgtctgtgcttttggagtcatctccaaaaaaatcattgcccagactaatgtcatagaactttttctctatatttatttctggtagttttatgatttcagatcttatatttaaatctttaatccattttgagttaattttagagctaaacaaggatgaaatgctctgtttcaaggatactgtttctcaggctttaaatattttcaagcagaagccagagagccactggttgactattcttttccaaagttgattgcctataattctaaatttaacactctggattgaaggtaagaaaagaacaaaatttttaccatgtgtctctcaactcctatcatattttagccatatctaaaagcaagacaccaggaaataaagataccagacttcctccttgctctgaggacagaagggataactgcagggtcctgattagagcccagccatattaattgtgtagctgttctygctcactctgattcagcctagtgatgagggtcagagctgatgtttttctctttaatcatagtaatgaggataaggtatacagcactgggggyacaatcttgaattattctttattgttgattattcataaagtatatctcaatcaaaagtttctaaatcaaaactgggaaggggatggcttaacggcaaagtgaggcaaagtttttaaaatgtttataatgtaatgtgacatttaaagattaaaatgtgttttatggatttctcatttttcatttgttacatgaaatcttagttttttaccttcaggttcttgggcttaaaaatgtctacctgcccaaaagacaggaaagtcacaaaataatacagatagcaaataaatatatatatatttttttgagacaaggtcttgcctgtcgcctagactagagtacaggtggtatratcatggctgactgtaacttcgaactcctgggctcaagtgatattcctgcctcagtttgacaagtagccgggaccacaggcatgcaccaccacacctagctgcaaataaacattttaaaattattttgtagggacggagtcttgctgtgttgcccaggctggtctcaaattcctggcctcaagcagtcctcccacctcagcttcccaagtagccaagactacaagcacatgccactgtgcccagccacaaataaacatttaaaaaaawtttttttaattgttttttgggagacagacaaaatctcgctttgtcatccaggctggagtacagtggcatgatcttggctcactgcaacctccgcctcataagttcaagcaattcttcgtgcctcagcctccagaacagctgggactacaggcatgcgccactgcacttggctaatttttgtatttttggcagagagggggtttcactaggttggccaggctggtctcgaactcctgacctcaggtgatccgcccacctcggcctcccaaagtattgggattacaggcgtaagccaccgcacccggcctgaaaaattaaatattactaatttaataattgaagaaatataattaatttagtaatactaattagtaattgaagaaatacaaattaaaatattaagctatcattttcccttactaagagttttttgatgttttctattataaaactataatacctgtttagtatagaaaataagaaaatacaaataaaagaggaaaacaattttaaaatacttgtaatctcatcacagtagcaacacaacatctcattatgtagatgatagtcttttttctatccatgtctaaaacttatctaatagtctgttgatgtacatttgaactttttgtcataagtaatgctgtaataaacatcttgcatgttaatctttttttgcatctctgattttcttaggataggttccttgaactgcttgctgagtcaaaacatattgcatttttcaggcgtttggttatctgttgccaaattgctgaccagaaaagttgtatcagttatatgagcttattggtttatccattctataatctgtattctttattttattttcctatattttttctttcagacttagtcttgcagatatattattttcttatcaccctttttttttkttttgttttgtttgagacagagtcttgctctgtcgcccaggctagaatgcagtggtgcaatcttggctcgctgtgacctccacctcctgggtttaagcaattctcctgcctcggcctcccaagtagctgggattacaggcatgcaccaccaagcccagttaattttttgtattttagtagagacgggggttgtaccatgttgcccccaaggtggtcttgaactcctgagctcaggcagtctgcccacctcagcctcccaaagtgctaggattacaggtgtgagctactgtgcccagccatcatctccattttgataactccagaatggtatcttgtttttttaattttatacttctttgattaataatcagaatttattttatatgtcctaataacaatactacaaattaaactcttcattgccacattataagaaaaaacagacaaaaatatacacaccttaaatgttcaactaaaaaggaaagcagttaaataattataattctaatcaataaactattaaacattaaagctattaaaacataatgtgaagtatttttactaatataggaaaaatattagtttgtaatattaggtaagacaagtggtaagtttttatctgtaattatactttataaatgtataagggaaaaaatttgaaaggaaatccacaaaaatgtaattttctggtactgataggtgatttttaatgtttcataatttttaacactatccacatttttataattaacatttctatcacatttatgaagaaaatacatttgtgttcagtatactacacaaatggtgcaagagagaggaaattgtccacttataatttgtatgtagtcagtaagattctggtaggtagttaattagccattgccaaaatgttaaaggtttacttgcttcagaaactgactgttggaatcacctgaaaatataatgctaataattttttttttttccttaggttgctgctgttgatcttctggttcctggagttggggaactctttggaggaggcctcagagaagaacgataccatttcttagaggagcgcttagccaggtactggtcagacctaaaagaaacacaattgagaaattgagcataaggcgctcaaaggtggtcattgcatagtaacagagtgaagaccctgggcctcggcgcctgacagaactggatctcagattctctatgtccttgagcaagttgttagtttatctctgagcttcccgttcttcaggaatggaactcttacatgaaaaacccacagtgatatttgcccatttttacaaacctttccctatggaaagtagctttttaaaaagttaaaatgtgaagagagagttcccccttaaagcttgtcctacatttttttttaatttttttttttttttttgagacggagtcttgctgtgttgcccaggctggagtgcagtggcgcgatcttggctcactgcaagctctgcctcccggggttcacgccattctcctgcctcagcctcccaagtagctgggactacaggcgcccgccaccacgcccggctaattttttgtattttttagtagagacagagtttcaccgtgttagccgggatggtcttgatctcctgacctcgtgatctgcccgcctcagcctcccagagtgctgggattacaggcatgagccaccgcacctggccagcttgtcctacatttttatcttatctgtgttctttatttactctcaattatgattggcagacttctataaggacataaagacaaactctgagccagggaaaggatgaagttggggaaagaaaactagtcagatagcatttagaataagcacatttcacttcctcagattctcttctatgtaagggtcttgatttagctatttgaataactttattctaacttgctgtttgagaactgggaaacaaatctgtaaacacatagagaatgttttggagatgggaagtaaggaatcatgtttcaattgaaccgccactcctrcatatacatttatatgccataatgacttcctaaactaaccatacctgttttccatgattcctactttagtaaaagtactgccagacttaaaaaaaaaaaaagaaagactttaccatgtctgtatgcttcattctctccagatagtactgggtttcatagtaatctggaaaagccataattgtttaaaaatattctgttagccatttgtgaggccttcttttcctaatggggaaatgctttaaaagttgatgctttttcaaggtctcaacctatatgtaaatctcctgggtaacttagttttgttatcccactcatctgaactgctctactgggttaggatccaaaagaaaggggatggataaataggtttgaggaagactgtattcgttagacgactaactccttactactattacagcattaaaaaagtcctgagaaagttgtggaattgaaggtcagactctagttgaaaaaatctgagtattctctatgttttttaaaaagcacaataaaaatcacacatggcaagaaacctcatctgttgaaagattaattggtctgttttctttgcttgcttccttcctccaggaaacctttcctcgtaacattaaatgtttacctaatacctgataatagccacatctgtctttcgtaatgaagtggatatatatgattccctatttcagggatctgtctatggctgctcttcatgttttctgtatttttgtatatttgaatttttcatattcctggtcacattagatgcactgtggtccaaaacacattttttaaagggctgagttgaatttcaattaccactaagaatttaaaattttattaatagttctcaaacaagaatcaatgtgcaaccatattatgaaggcagcctcagaatctatattattgttttaatgttgaagaatgaaagttatatctctgtgtcccttgtctgtgtgtgcctcccaacaaccttaactagtaataatagtgcttttcttttctttttttttttttgagatggagtctcactctgttgtccagactggcgtgcagtggcatgatcttggttcactgcaacttctgcctcctaggttcaagcaatccttctacctcagcttcccgagtagctgggactacaggcacrcaccaccacacccagctaatttttgtatttttagtagagatggggtttcaccatgttggccaggcttgtctggaatcctgatctcaagtgatccacccaccttggcctcccaaagtgctgggattacaggcaggagccgctgcaccctgcctaataatagtgcttttcttatgtcacaggataataaactcatctcaggtgaatcccttcctttggactctggatcatattttctttctataacatttattgtgtaaaccatttatttgataacaccttgtgctattggttaagttactgtatggtttcagctcctcaactatattgagtattacttgagagcagaggctttgtcgtctacttcttcataaagagttctttgcacacacccagaataaatgtctagtggttaatatttatcttattgccgttccctgaaagaattttattttcctttaaacagatcgggacttacagaagtctaccaatggtaagaatgtggcccctaataattcttactctagctgcttgtctgactgttgcctagaagcgtttttacttgtatccccaagaccccatgaaagagtgttaaaaacaatgaacttaactgttcttaggtcagggaaggggttgggggctcagaagattacttacttcctttgggttcttgaaaaatagtaataatagctctcatttacttactgcttattgtgtgccagataattatgttaaaaattttatgtatattggctgggcgcagtggctcacgcctgtaatcccagcactttgggaggccaaggcaggtggatcacctgaggtcaggagttggagaccagcctggccagcatggtgaaaccccatctctactaaaaataaaaaaattagccgggcatggtggcaggcacctgtaatcccacctacttgggaggctgaggcaggagaatcgcttgaacctgggaggcagaggttgcagtgagctgagatcacgccattgcactccagcttgggggacaagagcgagacttcgtctcaaaaaaaaaaaaattatattatgtcatgtaatcatcctaccaccctgtgaattaggtactattatcctgacccttcttattactccctaggcatgaggcccagagatgttaactaacttagccaaggtcacacagtttgagggatagagatggggcttgatctctctgaatcaaaatgcttggctcggccgggcatggtggctcacgcctgtaatcccagcactttgggaggcctgggtgggtggatcacttgaggtcaggagttccagatgagcctggccaacatggtgaaaccctgtctctactaaaaatacaaatactagctgggcatggtggcgtgtgcctgtaatcctagctatttgggaggctgaggcaggagaattgcttgaacctgggaggcggaggttacaatgagccaagatcgtgccactgcgctccagcctggtgacagagcgagactccgtctcaaaaaataaattaattaatttaaaaaaatcctttgctcttaagcattatgctgcaatttctttatgtgtgaaattaggggcttgagctaagtgatccctaatgcccccacgaactatagaaatccaagctgcttagggaggaccacgtgtctgtacttatacattcacttcctcaaagttgttttggttttccttatgcagactttttcttcaagtacttttcaatatatatacattttttatttatatttctatattagcactccttcaggatcttggtataataataccaacaatattattaatccttgtgctgtgctcaggaagaggaaggggcaagttacctacaccctcgccttttggtatggaaggagataggtttcagagatgcaaaaaaatctaaaattggcttcaggtgatggcctttgaatgccttatattaaccagtaatgaccttaggcatatttaatctctccgagtcttgtttttttggctataaaatggaatgatactatctccttcacagagttattgtgyggatgaaatgaaacaatacaggttaagtatctacatagagtggaagcttagtaaatgctagtttcctaccccctttcttttctttgttctgagtcttgctattaggtagataagcctgatgattgagcaagcttatgtattttatagtttgtaaaaactagccttaaaaaaagctaaaccactagccttaaaaaaaagccaaagccaccgtgggtgcggtggctcacggctgtaatcccagcactttgggaggccaaggcaggtggatcacttgaggtcaggagttcgagaccagcctgaccaacatggtaaaaccccatctctaccaaaaataacaaacattagcccagcgtggtgacaggtgcctgtattcccagctactccggaggctgaggcaggagaatcgcttgaacctgggagatggatgtttcagtgagccaagatcacgccattgcattccagcctgggcagcaagagcaaaagtccatctcaaaaaaaaaagctaaatacagactgcaccccagcctgggcaatagagtgagactccatctcaaaaaaaaaaaaattggttaaataagtttaggccttgaaagtctttattaatcattcttttcccaactaaagttttcagatccttaagatctccttgaatttgcttccttctatattagtatattaaaggtaaaagagaccttagacatcttcatatctgtgatgtctgctagtgttccaccatacggtgagaagccaccccagatggctaagaatttactcacttcctatttctgtaccccatatgcaaattaaatctgtaactagttccacaaatttcgtagcatctcttccataatctcgctaccctggaaccaatttaacaacaatcaaacaaatacatatacattagaaaatttttttcttagaaatggattttttcatctatcaaagcaaaggcaagaaaaatgctacagactgaacccctctgctgacagtttgcagatattcatgccagtgtttcaatatcaatgtatgagaaatttagacccatctaaaactattgctggactttgtagcagccaggtcaggtcctgtaggcatctgtgacaggtagtttggtgtgctgttcatttcatcactgagtcaaagtgtactctttccccctgcctcgtaaactttaaagttaatttagcaactaaacatttcagttattcaagactgaataactgaatgtgcctcccattatttcttatagttattactaatctgaagttttatactagatatccctgtaatgttggtctcttacctgattacaactcatctgtttggagttaatcttttcctttaaaaagataagtgcttagacttaactccttgcaataccagtatatgtagccattattattaatggtggggaaataggttgatggacagtctttatgactgaggaaccaagtggctacaagttatgttgcttacgtcttattatagaactgattttacaaatcattcaagaaaatataaacttgcttggtttttgtctttttttttttttctttcttttttttttttttgatacagaatctcactctgtcacccaggctggagtgcagtggctccatctctgctcactgcaacctccacttcccaggttcaagcgactcctctgcctcagcctcctgagtagctgggattacagacgggcgccactacgcctggctaattttcctatttttagtagagacggggtatcaccactttggcagtgctggccttgaactcctgagctagtgatccgcccacctcggcctcccaaagtgctggaattacaggcatgagccaccacacccggccgataaacttgttttaatcaatattatataactcaagaatttccccacaaaatgacataataaaatatttatagttgcccttttcctcttttcttcctaaaactttttccagtgctggtgtgttagaatctgagtttcagtcatgtctgtgccattgtcttgccatgtggtctttagtgggaaaagaatgtgcgtggatgggtttcagaggctgtctagcatgtcagctaaatgactctgggcatcttcactaggcctaaggcagagaattaaaggtttctcctcactccagcattcaagcatatatttttgtgccttcaaacaaaacttcatgtaattaacacctactctagagctccctggtgataaaaagttgaatgaagcacagttcctgccctgttgtagcttataatctaatctataggatatcttttcataatgtaacaggcaaaactctgcactctcctctgtgtattgaacaatatgattttgggaaggaaaagaaaacattgtgattaacctaccaagaaataaaagaggcgtatattttcaagaaaattagtaaatctatagaaaattttctgtagcctcctgaggcaagttttctgtcataaatgcataaatataatagcttaaaaaggaaaagggaccaaagcccatgactgtatgacaggatccactgctgtttctctgggtaaccttggatagattattcagcttcttcctttccattgtctgtctgtggaggggaaagactggtctatcacagtgaggtaaacaataacaaatgattgcaaaatacgtttgaaacattaaattctaatcataacatctggtcttatactatatatagatgatgattttctatttttgaaaaacaggtatctggaccttcgtcgatttggatctgtgccacatggaggttttgggatgggatttgaacgctacctgcagtgcatcttgggtgttgacaatatcaaagatgttatccctttcccaaggtttcctcattcatgccttttatagctgraagattggttaaggaaaagcaccccccrtggcagagacactgcacatgattgtgcatacagcagaatgcatgtttggattttagaaatgcagatttcaatatgtaattgttgtgccataagatatcatagaaaaaatataagtggttgtgattttcttagaaagttgagggtatttcacgtaaggatgagctcccgcaagaagaggtacttatagcaaggggactctcaaatccattacctcaattaagaaatgaagaaattgaattagtctcaaagtttcttttaaactctaaaacagaatgagataatgtattttacgttgtctataatcattaaatcactccctgtgtaatttgtgagaaccatctagtagctcgaaataaaataatgttgcatcttttctcccttgccatatactttgtgataaatccttatctcattttcagtacttcattaaacattgcagaaaaaaatattccttaaggtcttaattgatttaaagaagtagctattctgaattgaaatctcctttcattgaactggatgaaaaaatcatgtttaataactgttgcttttcaattttcaaagctgttgagatattacattaagtatttcaactctttaatcactgttgttataatttgtttatatttgaygtttataatttgtctaataaaatagatttttttaatagacacctatggaaaaaaagttatatattttttaatttcatttggtcctttcccagtaaaatttggaagaaaggtattttcaatccaagatgaggatgggagtttggctgagcctaaaggatgggtaattctagagttaaaagtagtgtggtcagctgggcatggtggctcacgcctgtaattccagcactttgggagggtgaggcgggcggatcacttgaggtcagtagttccagaccagtctggacaacatggtgaaaccccatctctactaaaaatacaaaaattagccaggcgtggtggcaggcgcctataatcccagctacttgggaggctgaggcaggagaatcacttgaacccgggagccgaggttacggtaagcaaagaacgggccactgccctccagcctgggagacagagggagactccatctcagaaaaaaaaaaaaaaaaaaaaaaagtactgtggtctatgaragtgaraaragcattgattggggagtttagaacctgacaattctagcactttagacaggctgcttactgtgtaggagctcaacatcattttcttcagagttgataaaataattacatgtgtgtttgtgtgtgcgtgtgcgtgtgcacacacacacatgcatatgtttaaaactgaaatgctacaaaaacttttttaaaactcttgttttagtctttgtcttcattgagttacatgtataaggacctatatagcaaattgtattctcagtagaatacgcatgtatcaagtaattgtaaatgggcatgcatgcctgaataatcagttttctaagtctcattagatgggttctcctagattatttcctaatgaaatttgtatgtatactttattttaacctaattcaaaatcaaacagctgaaaagaaacaaattccagagccttaagagttggaagacacctgagagtttgtcaaagttgaccttctgcctaatgcagagagattccatttacctgggcacttggttttccagcctctttttgacaaagaaatcagtgtcctacaaaattgctcattccatttctgaatctaattggtagcttttgctgagctaaaatctcaggaaaatctacttccctggaactttaatcccttgggcttagatatcaagtttaggacaggctaaaagggataattagggcttccataaggcttgcctcaaccataattagagagagaaattcatttgtttattcaacaaatatctgagcttcttttatatgccgagactatgtggtaggtgctatataaacagttgtggatcaaacagaaatgaccctgccttcatggaattattaatatatttgagaagatatataataattaaataacttatttcaaaatatagtatgtgctgtaaagttatatgaagaacaggaaagcatagataagcttgctagaaaaggcatgtctgaaaaagtgacatttaaccatagacctagaagataaaatgcagaaaacattttaaaaatatttgcagcatcagcctgtattgatttggcattcaggtcttactagataccatattaattttgtggaatgagggacatttatagacccagaacctggaggcactataatttccaaggctatcaggaattatgcctcccatgatttttgagggacctgatagcattgtaatgttaacatgacagaggttaacaaaataatagtgatggaaagattgctgagttagagaaaccccaggttctggacccagcattaccataaatgtagttgtagagcattaggcaagtaaaataatctttgtgacctccagttttttcatctatagtactatcacattttgaagtaggtaagctctatggatccttttatctcttaatcttctgtgaacctgtgctgaacttagtcactaataattgatttagagtctaacctttaggcaatatgtagtcccctattttagtacatattaagtctccaaaatgtataacgaagtcacatcgctgaaagttgaacagtagtcttaaatgtgttcatatactgtatatgtggaaggaggaaaggtccttctcaaggcatcttgcctttttgatagtgttttcaccaatgtatttccaaaactttatacattcttttccttgatagttgatcacacaatgaatatctggttgaagccaaatacttgccacctatagcaagcctaataatttgtctttggtgcaatacttctattttgccaataattgaacaaaaacaaaaattcaagtcagacaaagatgatgaaaatgccaaaactgaactgttgcttgcaggcagcatcagcaggaaaaaactcaaaatgtttactcatcagctgagatatgaatatctaaattctacattgcaaacagtgttgtataagtcagtgtataatgaataaacgtatggattcaatagttgagtactgtctacaccataatagcttttagtgctcagtttctgagttaaaaggtgataagagggttagtttttcacttgagcaacccatttccaatgaggaaagaaatcagattatgttttcctaagatttccaaatgccacctgaaaataagaaccccagcaaccaaagtagaagtatattctaaaacttagaaaggttttttccattattctcattcttatttcaaattttgagataggttgagaaaaatagttgctttccatctggctgtccttttgcctggggaaagttgtgctgtcatgtttttaggtctgacaagaacttaattgtgtgagtgatccattccagatctagacataactctccaacccagagactcttcaactgtcacagaatagcaaaagaactatttgaccttttgttcttgtcagactggatctgccagaagcctccctctacaatgttatatattcatattctctataaattgaatgtagacattgaagcatgactgaacaggcattgaagatgtacttggtgaggtggattaactctacccatctttaaatccgttgcttcagataattatagatgagagatgcttatttggattggattgctatttattcttatgtttattttactaagtggtgaggcaagaacacaaaaatgtacagttgaaagacagattggcctgggttgattgataagtaatgtgtggggtgttttggcttctgatcaatatttgtattcagtctgcaatctatgtataattaaaaaaacaggtgagagtaacatctgattataatttctccccagttaatcttcagaattaaaagatagtaaaagcgttaagaaaagggcagaaagcgggccgggcacggtggctcatacctgtaaccccagcactttgggaggccaagacaggcggatcacctgaggtcaggagttcgagaccagcctgactaacatgatgaaacccatctctactaaaaatacaaaaattagctagctgtggtggtaggctcctgtaatcccagctccttgggaggctgaggcaggagaattgctggaacttgggaggcggaggtttcagtgagccgagatggtgccattgcactccagcggggggcagcagagcaagactccatctcaaaaaaaaaaaaaaagaaaaagaaaagggcccaaagcaaccttaatcactgtattgaaatgatttagtatggcttttgtaagaaagtattttaagtcatggtcagcatccctccctgaacttggacattctactgttgccaggagccctagattggcctgtgatcaactaaggctccagttagctgttgtgcagtttggacccagcattaccataaatggagtccagcgaatttctagccattatcagcacactggatagtttctgggggacctttataaagaagacaccaggagtttaggtggtttttaaactgtcattcaggcagctggtcattgaattaacatagctcatgacttttcaaaaattttctgctatacctttactgttcataattgttactaataacatgactattatttaggcattgctttacagttcacaaacatgtttcatgtatcttattttcttagttatcaagacaatacattgtggactttgttcctttgtatcttactggtcatgaaatttatttggtttatttgttataaaaattcaaagttccttttgggaggccaaggccggcagatcacaaggtcaggagattgagaccatcctggctaacacggtgaaaccctgtctctacaaaaaaaaaaaaaaaaaaaaaaaaaaaaaaattagccgggtgtggtggcaggcgcctgtagtcccagcttactcaggaggctgaggcaggagaatggcatgaacccgggaggcggaacttgcagtcagccgagatcacaccactgcactccagcctaggcaaaagagcgagactctgtctcaaaaaaaaaaaaaaaaaaaatcgaaagttcctaatactgagagaaagactgcaaataaaattcactgccctcagcttccagagaaaccaaaaaacataaaacctaataaccaaagaatcttgcatcttaagccccagagtttactgaatgtgtcgcaaaatactcaccttgaccttgttctacccagggtgaagggacaggagaatgtgaaggaagatgatgtttgatctcaaatacattggagtaaagagaaacactaaaaatggggtaaaggatcctagacccagcaatgtacttaagctcattgtgcctcaatttgttatcagtttatactcacatttgccaccttccttttaggatcatctttgaattgtggatagaaagatacatgaaagaaactttgataggaattattaatatcttcctcgaagtcacagacctttgatttttcaaggtaataatctgaaaatagatacatggtgagcctgtgtaacaaaggttttttttctgcaacaggtgcccatgtacacagctggaactgtattttgccgaacctgagccatctacaactgtgattctttgattcataactttctctacacactagctcaataagaattgctggtttgccattttcctaggaacctagttttgaaaaatcttggaaagaagataattcttcccgtttatgatatatgaactactcccctctgtatttctcctgattcctagtaatttacctattgtagcttcactgaataggaactcactatcttaatagagatcttttatttatttatttatttatttatttatttagagacagggtcttactctctcactcaggctagagtgcagtgacgtgatcacagctcactgcagcctcagcctcccaggctcaagtgatccttctgcctcagcctcccacgtagctgggaccacaggcacaagccaccacacccagctaatttttgtattttttgtagagacagggttttgccatgttgcccaggctggtcttgaactcctgggctcaagcagtcctcccactttggcctctgaaagggcagggattacaggcatgagccactgtgcctagccttattttttggaaacggtcttgctttgtcgctcaggcttaagtgcagtgatgtgtacatggctcaatgcagcctcgacctcctgggcccaagcaatcctcagcctcccatgtagctgggatcacaggtatgtgccaccacatctagctaattttttatagagacagggtctcactttgttgcccaggctggtcttaaactcatgggctcaagtagtccgcttccctcagcctcccaaagtgctgggattacaagtttgagccaccacacccagccaagaagtttttctctcctcagagagctctggttgttagaaacttctacctgagaataaggaaacctgtctctctgtatcatgcaaatggaataaaatagaaacacaactcctcctgttttccagtatagaacctctaactgctcaggtggactgtctgtccttccctgaagtgctgcacccctctgttattcatcaggtcgtgtgtcc

SEQ ID NO: 95299 - DNA, 98973 bp, Homo sapiens
aaagttagaaaggtctcaagttaagaatctaacatcacaactaaagaaccaagagcaaactaacctcaaagctagcagaagacaggaaataaccaaaatcagagctgaactgaaggagactgagacacaaaaaaacattagaaacaacaacaacaaaaaaaaacagtgaatcaaggaattggtttcttgaaaaaattaataaaatagaccactggctagactaacaagaaaagagaaaagatccaaacaaacacaaatagaaacaacaaaggagatattaccactgggggacttcacagaaacacaaataactatcagagaacattataaatactcctatgcacaaaaattagaaaagctagaaaaatggatatattattggacacatactccatcccaagaaattgggaggaaggaagaaattgagtccctgaacagaccaataacaatctctgaaattgaatcattattaaatagcctaccaaccaaaaataaaaagccagaaggatccacagccaaattctaccaaatgtacaaagaagagctggtaccattcctactgaagcgattcaacaaaaagtttaaaaaatgaggagaaaggactcctcccttactcattctatgaagccagtatcatacctaaacctggcagagacatgacaaaaaaaaaaaccttcaggccaatatccttgatgaacatcagtgtaaaaatcctcgcaaaatactggcaaaccaaatacagcaacacatcaaaaagcttattcaccacaatcaagtaggctttatccctgtaattcaaggttggttcaacttacacaaaacaataagtgtgataaacttaacaaaagacaaaaaccacatgattatctcaatagatgcagaaaaggcttttgataaaattcaacacaccatcatgtttataaactctcaataatctaagtatggaaggaacatacctcaaaataataagagccatctatgaaaaccacagccaacatcatattgaataggcaaatttggaaacatttcccttgaaatctggcataagacgtgtgtgccctctctcaccactcctattcatagtactggaaatcctggccagggcaatcaggcaacagaaagaaataaaggtatctatacagaaagagaagaagtcaaactatcctttttgcagacaacataatcttatatctagaaaacttcatagtctcagcccaaaagctctttaagctgataaataacttcagcaaaatctcaggataaaaataatcagtataccaaaatcactagcactcctatacatcaacaacagtcaagctgagagccaaatcagaaactcgattctattcacaattgccacaaaaagaaaaaaatacctatgaatacagctaaaagatatctgcaaggagaactacaaaacactgctcaaagaaatcagagatgaaacaaatgaaaaaacattccatgctcatgaagaaaaacaataaatgtcattaagatagccataatgtccaaagcaattaatagattcagtgctgtgcctatcaaactattaatggcattcttcacagaactatagaaaatactttaaaattcatatgaaccaaaaaacagccctaacagccacgaatatcctaagcaagaagaattgaggagaaggaactccctcttctccaaagctggaggcatcatgctacacaactttaaactatactatagggcagcagtaaccaaaacagcatggtaccagtacaaaaacagacaaatagaccagtggaacagaataaaagcccagaaataaagtggtacacctacaactagctgatcttcaacaaagctgacaaaaataagcaataggaaaaggattccctattcaataaatggtgctgggataactagctagccataagcagaagattggaaacaataggaaaaggtctccctattcaataaatagtgctgggataactagctagtcataagcacaagattgaaaatggatgccttctttacaccttatacaaaaattaactcaagattaaagacaaaaatttaaaactcaagactataaaaaccctggaagacaacctaggcaataccattctgaacataggaatgggcaaagatttcatgctgaagatgccaaaagcaattacaacgaaagcaaaaattacaaatgggatctaattaaactaaaaagcttctggacagcaatagaaactattaacagagtaaacagacaacctatacaaatgagagaaaatatttgcaaactatgcatctgacaaaggtctaatacccagcttccataagaaaacttaagcaaatttataagaaaaagcaaactacattaaaaagtaggcaaatgacatgaacacttttcataagaagacatacatgcagccaaaaagcatatgaaaaaaagctcaacatcactgatcattagagaaatgcaaatcaaaaccacaatgagatatcatttcacatccagtcagaatggctattgttaaaaagttaaaaaaaaaaaaaaaacagatgctggtgaggttacggagaaaaaggaatgcttatgtactgttggtgggagtgtaaattagttcaaccatagtgcaaaacagtttggtgattccttaaagacctcaaaacagaaatgccattcaactcagcaatctcattactgagtatatacccaaaggaataattctatcataaagacaaatgcaagcatatgttcattgcagcactattcacatagaaaagacatggaatcaaccgaaatgcccatcaatggtagactggataaagaaaatgtgatacatatacaccatgggatactatgcagccataaaaaaggatgagatcatattctttgcagggacatggctggagctggaggccattacccttagcaaactgatacaggatagaaaaccgaatattgcatgttctcacttataaatgagggttaaaagatgagaacacatggatacacagaagagaacaacaggcactgcatcctattgcaaggtagagaatgggaggagagaggggatcaggaaaaataactaatgggtattagatctaatacctgagtaacaaaataatctgtacaacaaacccccatgacatgagtttacctatataacaaagctgcatctgtaaccttgaacttaaagtaaaaaaaattaaggtatagttggcaggtaaaaattatatacatttatggtgtacaacttgatgttttaatgtatgtatatactgtgaaatcatgaaatcaagctaattaacatatccatcacctcatatacttatcattctatgttgtgaggacatttactatctagcctcttagccattttcaagtatatgagatattattactaactgtagcacagtaggtctcctgaacttattaatcctatatgactaaatttttgtaccttttggccatcatctagccactcccctgtcctcactctcatgccctgacaaccaccatactactctatgcttctatgagtttgacttttttagttgccacttctaagtgaaatcatgcagtgctcatatttctgtgcctgccttaattcacttagtacgtgtcttgcaagctcatccatgttgtcacaaatgataagatttccttctttttcagggctgaatagaattccattacatacacacacacacacacacacacacacacacacacagagacacacacataatatattttctttatccattcatcgatcgatgagcccaggttgattccccttattgattattgtgaacaatgctgtaatgacattggtctaggcagtggttttttgtatatgaccccaaacacaggcaacaaaagtacaaataaatgaggtggcatcaaaacaaaaagcttttgcacaaccaaagcaacagtcaacagggtgaaaagataatctatggaatgggaaaaaatatttgtaaactatccatctgacaaggagtatccaaaatatataagaaacactcaacagcaaacaactcaatagaaaaaaaatctgattaaaaaatagacaaagtatctgaatagacatttctcaaaagaagacatacaaatgtccaacagatatataaaaaaaaatggtcaaatcactaatcatcatggaaatgtaaattaaaacgcaaactacaatgagaaactaccttacactgttggaatggctttcatcaaaaagacaacagatgagtattgaagagaatgtagagaaaaaggaatctttgtatactaatatggtttggctctgtgtccccacccaaatctcatctcaaattgtaatccccataatccccacatgtcaagggaaggatctggtggtgggtgattggatcatgggagtggtttcccccatactgttcttgtcatagtgagtgagttctcacgagatgtgatgcttttataaggggctcttccttcattcatttgctctctcttgcctgccaccatgtaagatgtgcctttgcttctctcttgccttcttccatgattgtaagtttcctgaggcctccccagacatgcagaacgatgagtcagtaaacttgataaattacccagtcaggtatgtctttatagcagtgtgagaatagaataatacatacactgttgctggaaatgtaaattggtacaaccgttatggaaaacagtatggtggttcctcagaaaattgaaaatagagctctcatataatcctgcaatcctacctctggatatatatccagaggatatagaataagtatgtcaaagagatagctgcactcccatgttcatttaagaagcttcttacagtggagagcagagttttgattatttacctgtttctgagaatcaattctttatgtgcaagtctttaaactttattaacagatttacttgtcggtttatttattgtttgttctatttaatcattccattagaaactatttatatctggcacattcttgtcagcaactttcttaaagctgaaacagaatttacctaatttattccagtaattgttactaaagtacaaagtgtaaaggaaaaattcattgtgtatatttctgtgatgtcatgaattattaaaatataattatctgattgcttttggcatacttataacttcagttaccgtgggtttaagatgctggtcacatttatgacggcacccacatatacacaccctcctctcatacatggaaaacaaaacctgctgttgttttcactggccagtgggtgtcagtaatttgacctggagacttgggggaagaaaggaggaaagtggaaaaaaggttcctttcttcagatgcagggaaacagtttaaattttattgttaaaggatctgaaaaaacatcgtttagggaggggatgctgacattctggaaggggagatttcccataaaggaggccaccagacagttgggctgcattttctctctgtgtggctacctcttgttcttttttgactgagtctcactcacagccctgtgaatccttcgggcaagaagcaacaagttgcaggctgcttctacatctgcctaggaagagggtgttaggtgggaggagggcagatgactcaagcgtctctctcctggaccttagtttccacctgtagactttcttttaatgtaatctagactctgttaggacctaggacctgagaccagtccaacagggtctcccccacactgggcactctccaagagtatgcctggcagtcaggctctgaatgctggcatgctgcctattctggcctttcccttttgttgccctaagggctgtgtgttgtgaatcaaatcactgggcaaccaagtaccttcaaaaacagccccaagctctctggaaactacttcctattccagccaaaattgcagagaaaggagggcatcaagcttaggggaccaatccctgtctttctaccagtccctgataactactcaagctccctttaaagaggctcatattggaatactctgttgacaagtagataccacttcacctctgctagggtgagcgctggtagctcctccctgttaaatgcccatctcaatgcctctgccctaagtgagttgtgcaataaatgagctgtcactctgaacaggtgggaaagaagtgaactgcttgttcacttgctgctgttgccactgctggtacagaaatagaaggtaagacaggtgagaactgcttttccttctatcaagaaagattccaaactgaggcaatgctttgcattgagtcctggggttttgtggttttgggaaccaacagtactcaaagtattttctcttgctaactgcttcccctctaggccataaagcctcttttctttctttttttttttttttttaaaaaaaacacagcacaaaaaaacaaagacaaaaaacctccaagctcccttcagtagttgctacaccttcagattgagacatccttcctcatttacaaacctcagctgtgtctgggggcagggccacagtgaaactgccaggagcaaaaaggcttccaagaaaaagtaccacatcagattggaaactggggacagatcattcctgggatgtgacgggcaccagaatgctccctctccaaaggatctaaggaccaaagctgacagtttctttacttggtaagttttgggtggtttgctgtgtaaagcatatctgagaacaggtatgattgagctcatcttccttttctccttattgcaagggtttgtgaattcaagtctgtggactgaggtggtggggagcatccaattagaactccattcacatgtagctcacagtcatgtgggctgtgctggggatggtccatcaagcatttagaataggcttggttttggaatgcagtggatctgattgcttcttggcagcttctctttcccaattatgtttggcttagtctgatagtcaaattactttataatccctaagctgatccagaaagtaaacagaagagacagagagaacgctgtctaaaaagagactggggatggggcaaggaggattctggttggattttcaaaatgttccctgaataatccacaacccatcccaaagaatggtgactgcatatgataccctagctctttgttaagctcaaaaagctgactataacatgcctctttaaaatgctggccaattaaagccactatgcacatcttcaattgttttgttcccttaacgaagctcaagaaggtatattacaggtatggatttgattaaaaacgtaaggtttctcataatgaatatatgttctggtttaaataatttagaaattttcctaaaatctaaacccagtactttgcattacatcagaaaacaaagccttgataatttgatttccaatctgaaaatggtgattccactaaagtgaagctaaagttttcctttgtataatttacaaatgaagtgtttgcatgaaatttaatgccttaagcaagacaggcagaattgtgaacctattttagagaatgcactggtttttctaatggcattatttttgttgttattgttgctgagatggggtcttgctctgtcatccaggctggaatgcagtgatgcaatcacagcccactgtaatctcaaactcttgggttcaagcgattctcctgtcttaacctcccaagtaactcagagtatgtgtatgcaccaccatgcctgcctaattttcttttgtagatatgggggtctcactatattgtccaggctggtctcaaattcctggcctcaaacaatccttctgctccggcctcccaaagtgctgggattacaggccactgtacctggcttctaattgctttatagaattcattattcacatgagaatatattcacaaattgttaagtatctcagccacttattaaaccaagtttaaaaataataataataaccattttataattttaaaaagatttcaagttgaagaaccttaggtagcaggtgtcttgagtagagtatgtatgtactcaaatgatgtcaaactgcaggcactacaaatattgtctggtcaacctccaccttaccaagtaaaaattaattgattttgttatttaaaggttaaaatataaaataataacaatgtagttaagccttcatggtgtaatgtctagaaaacttcttgccctttctctccaaagctgaaatgccagatggtgaggttaattaacacacaacaatcttgagatttagctactaattttttatttttatttatttatttattttttgagacggagtctcactctgtcgcccaggctggagtgcagtggcgcgatctcggctcactgcaagctccgcctcccgggttcacgccattctcctgcctcagcctcctgagtagctgggactacaggcgcccgccaccacgcccggctaactttttgtatttttagtagagacggggtttcaccgtgttagccaaggtggtctcgatttcctgacctcgtgatccacccacctcagcctcccaaagtgctgggattacaggcatgagccaccacaccctgtcctaattttttttaagttatacttttaagtgctggggtacatgtgcagaatgtgcacgtttggggtacatgtgcagaatgtgcaggtttggggtacacgtgcagaatgtgcaggtatacacatgccatggtggtttgctgcacctatcaacgcgtcatctacattgaataccctttatttctttctcttgactaattgccctagcatttctcctaatggtatccctcccctagccccctaccccgccacaggccctggtatgtgatgttcccctccctgtgtccatgtgttctcattgttcaagtcccacttatgagtgagaacatgcggtatttggtcttctgttcttgtgatagtttgctgagaatgatggcttccagcttcctccatgtccctgcggaggacatgaactcatccttttttatggctgcatagtattccatggtgtatatatgccacattttctttatccagtctatcattgatgagcatttgagttggttccaagtctttgccattgtgaacagtgctgtaataaacatacatgtgcacgtgtctttatagtagaatgatttataatcctttgggtgtatacgcagtaatgggattgctgggtcaaatggtattcctggttctagatccttgaggaattgccacactgtcttccacaatgtttgaactactttatattcccaccaacagtgtaaaagtgttcctatttctccacatcctctctagcatctgttgtttcctgactttttaatgatcaccattctaactgacatgagatggtatctcattgtggttttgatttgcatttgtctaatgactagtgacgatgagcttttcttcatatgtttgttggctgcataaatgtcttcttttgagaagtgtctgttcatatcttttgcccatttttgatgggtttttttttcttgtaaatttgttgaagttctttgtagattctggatattagacctttgtcagatggatagattgcaaaaattttctcccattcggtaggttgtctattcactctgatgatagttctgctgtgcagaagctctttagtttaattagatccagtttgtcaatttgggcttttgttgcccttgcttttggtgttttagtcatgaagtctttgcccatgcttatgtcctgaatgatattgcctaggttttcttctagggtttttatggttttaggtcttgcgtttaagtctttaatccatctttagttaatttttggataaggtgtaaggaatggatccagtttcagctttctacatatggctagccagttttcccaacaccatttattaaataggaaatcctttccccattgcttgtttttgtcaggtttgtcaaagatcagatggttatagatgtatggcattatttctgaggcctctgttytgttccattggtctatctgtttttgcaccagtaccatgctgttttggttactgtggccttgtagtatagtctgaagtcaggtagcatgatgcctccagctttgtctttttgcttaggattgtcttggctatgtgggctcttttttggttccacatgaactttaaagtagttttttccaattctgtgaagaaagtcaattatagcttgatggggatagcattgaatctataaattaccttgggcagtatggccattttcacgatattgattcttcctatctataagcatggaatgtttttccattgtttgtgtcctctcttatttccttgagcaatggtttgtagttctccttgaaaaggtccttcacatcccttctaacttggattcctagatattttattctctttgaagcaattgtgaatgggagttcactcatgatttggctctctgtttgtctgttattggtgtataggaatgcttgtgatttttgcacattgattttgtatcccgagactttgctgaagttgcttatcagcttaaggagattttgggctgagaagatggggttttctaaatgtacaattcatgtcatctgcaaacaaagacaatttgacttcytcttttcctaattgaatacgctttatttctttctcttgactgatcaccctggccagaacttccaatactatgttgaatagtagttgtgtcagagggcatccttgtcttgtgccagttttcaaagagaatgtttccagtttttgcccattcagtatgatattggctgtgggtttgtcataagtaactcttattattttgatatatattccttcaatacctagtttattgagagtttttagcctgaagggctgttgaattttatcgaagcatcatacttctcctgagaaagagatgaaaattaacagatactgacgtttgctaacataggtctatgctggtcttgttttccatttactaaaaacactcaagaaataacagccttttattctgagggataagtaatttagtagataaatcagccttctcaggtacatattaatctactacaattttaattttatgtataataactataaagtttctgcatctgcttcctgtgaattccctccaaagcctatgattgaaattagttgtaagtaatgtttgaagaacttttgcaatttcttttatgagaacttgaagagtatcacttaatacatataaacttagctggcaaatccaggtttggggcaacctttctcactaatgagcagtgtgagcctggacaaatcacacccaacatttctgagcttccattttccctgcatgtctgatgagggccctgtgacccaacaatagcacaggctgtttctttctggctctaaaagctctagctctaagttacttttatttccaagatcaatgcataaaataaatttcagagctactttcttgattttccaaacagtgctgaagaatcaggagacaaacttgaatttgtaatattaagaaaaagaaaaaaaaggagaaaacccacacccatcactgaagtaatttcaaaaacaagcaatttacttgtgcccaacagaagtcccagacaaacttctattactctgaagagaaaaaatatggtaggtgaataaattaggagggaaacacaccacagacacacacacacacacacacamtacacacatgtattaatatgaagtaaaagaaacctatcccatcagataagaatatgccaaaaatccaaaggctgtttttcagaacaggtgaaactactgtttcccaccaaaaccaatctgatatttcataaactaaattacaattgtaagaagaaaaataagtgtaaaataagaatttttgttttataggtgttctttaatttgtcaaagacatcccactgataaaaattcatcctatatagctaggagctatatataggagctatatctaaatttttcttttcttcagagaaacagagtagcttatcatctaactaaattgctatggtgcttcaactgagctcaattctaacaagtcaagttggttaaattacaaaaacagatttcaacaaatcatgttaacatacaagctataattttcagaaagcatttgcttttaaacactgatgatctgcaatgtttttttttaattttcatcacatttgccccagtagacctttaaataatccagaaaaagttaaagtgggaacttattttcccattttgccctgcttttgttttgattacctttcacgtttatcataaatttaagaaagggattgtgaagagaaggaatgacccactaagtttctacagagatacctaagtaatttaacatcagcaacacccaagtctttccagttcttccacattctcccatgtgccttgggcaccctccaatcagacactatcctgacatcrcctctcttggaacaccttcctcaggacatccatttggcaaaatgggttggaaagaatggtctcaggttcccccagtgattggaaatgtgcttctgcctctctcattcaaacctaggtagaagaagaaaaagaaaaaaacagatagaaagctcaaaacagcagtctgaaatgtaattaatgtttcttggcacagatgtctataggagtgatcacttcaatagttggtgtgacatgggcacaccaccatctttaagcagaggaaccatgttcctcatggtagaaaatgcacccctggactgggtattcattaagtattagtgtttcacatttcaagttatataaaaatactttcagccaaaaaattttcaaacacatgaatgaatatattttttaaaatgtattgagtttaatatatatatcagcacacaaagaacttcataaaaataaataagaataatttttaaatggtcttattcctacaagaacctaagataaatcatccgtatgctagtatttcctagcctctttctacttctgttttttggggtaattacagtagattttttctttggcttgaaatgaggattcaatgagttattatayataaagaacttcaaacagtaagtggcayaaagaaagcattcaataaatgtaaactattattacttttactactactgctacttctactactattactactattgtaatcttaccgtccatacaattaaaactaataatcttttttcactttatgttgttatttttcctgttttattgaggtaaattgacaaataaaagttgtaaacataatggtcagtgtgatgcttatctatacattgtgaaataattaccacaatcaaactaattaatatatccataactttacatagttatcattgtatgttgggggggtgagaacacttgagatctactctttcagcaaatttcgaatacacaagacagtattattaactatagtcactatattgtacatcggatctccagaatttatttatcctgaataagtagtatgctttgaccaacatatccccatttctcccacctcccaggccctggcacccactgttctactcatgacttctatgagtttggcatttttagattccatgtataagtgakatcatattgcatttgtctttctgtgcctgacttatttcacttagcataatgcccttcaggttgatctgtgttatcaaaaatgacagaatttaccttcttttttaaggttgaataatattgaggtgtgtgtgtgtgtgtgtgtgtgtgtagacagatgatatagatagatgataggcagatagatagatgatagatagatagatagatagataatagatagatatgggtttgatatataccacatttttaatccactcatttatcaatggacaattagttgattccatgtttgggctgttctgaataatgctgctatgaacatgagaatgcaaatatctcattgacatactgatttcatttccttagactatatggccagtaatgatactgctggaatggtagttctttttttttttttttttatactttaagttttagggtacatgtgcccattgtgcaggttacatatgtatacatgtgccatgctggtgcgctgcacccactaactcgtcatctagcattaggtatatctcccaatgctatccctcccccctccccccaccccacaacagtccccagagtgtgatgttccccttcctgtgtccatgtattctcattgttaaattcccacctatgagtgagaatatgcggtgtttggttttttgttcttgtgatagtttactgagaatgatgatttccaatttcatccatgtccctacaaaagacatgaactcatcattttttatggctgcatagtattccatggtgtatatgtgccacatawgttatttgggggggggaacttctgtactgttttctataatgactaaaataatttacattcccactaacggtgtacaagggttttcttttctccatattctcaccaagacttaycttttgtctttttgacaatagtcattctaacagatgtgagatgatctcatgaggtggttttggtttgtatttacctgatgataattgatagcatttttatatacctgctggccatttatatgtcttctttagagaaatgtctattccatttccttgcctatttttaaaatttttaattttttattgttttagaggtagggtctttctatgttggccacgttggcctcaaactcctgagttcaagcaatcctcctacctcagcccctcaaatagctgggattacaggcatgtaccactgcacccagctgcccattttttaattgagtagtttgttttatttctgttgagttgtttgaattcctcatatattttggaaattaaccccttatcagatgtatgggccctgctgtggcttacagaagagtcagcatggctccatttgaaagtgactttagcayacagaatgatataggatgattgcttcacttacttgattaaaataagtaaaaacatagayggccctcagatgtatgatttacaaatattttctctcattttttaggctgtctcctcactctctttattatttcctttgctgtgcagggatttaattcaataccatctcatttgtttatttttgcttttgttgcctgttcatttgggttcatatccaaaaaaatccatgcccagacaaatgtcatggagttttcccatatgttttcttctagtagttttagagtttcagattttatgtttaagtctgtaatccattttgagttgatttttatgtatgatgtgagatgagggtccaattttatacttcttcatctggatatttagtaacactccaccatttgttgaagagactttcttttccccatttagtgttcttgggatctttgtcaaagattaattgaccttatatgcacacatttatttgtaggctgactataactttctattgatttatatgtatttttattccaataccatgctgttttgattattatagttttgtatgatattttgggatctgataatgtgatagttccaactctgtttttccttctcaagactgctttggccactcagattttttgtggttccatacatattttagagtgccttttaaaatttatttgataaatgtcattggagttttgatagtaattgcactgaatctgtagatgactttggtagtatggatattttaccaatattaatcattcaaatccaagaacacagagtattgttccatttatttgtgtctcatttaatttttttgtcatcgtcttatagctttcagtgtatagatcttttactccttggttaaatgtaattctaagtatttttagtggtcctggaaattgaattgtcttatcgatacctttttcagaatgttagttgttattatacataaatgctacgaatatttgtatgttgattttgcattctgcaactttactaaatttattagttctaaaagttttttctgcagtctttagggttttctgtgtataagatcatgtcatcagaaaacaaggacaattttagttcttcctttcagatttggatgcctttcatttcatcttcttgcctaattgttctggctaggacttccagtactatgttrttagaagtggttagagtgggcattcttgtcttgttcccaatcttagaggaaaagctttcaacttttcatcagtgaatatgatgttagctgtgggcttggcacagatggcatttattatgttgagatacattccctctatacatctttgttgataattattatcataaaaggatgttgaattttatcaaatgccacttctgcatctattgaaatgwccacctaatttttatcctgaattctgctaatgtgttgtcatattyactgatttgtgtgtgtcaaaccatctttgcatcccagagataaatctcacttgatcatactgtatgatccttttaatgtgctattgaattcattttgctagtattttgttaaagattttgcatctatgtttaccaggaatattggtctgtaatattctattatttcagtattctagtctgcctttggtttgagggtagtgctggcctcataaaatgagtttggaagtattccctctctgtcaatttttggggaaaatttgagtagaatttgtgttaattcttctttaatgtttggtggaattcactggtgaagccatcaggtccwggagtttccatggttggaaggtttttgattaccgacttaatcttcctacttattctgttcagattttctattcatgattcagtcctggtaggttgtacatttctaggaatgaattcatttcttctagattattcaattattggcatgtaactgttcatagtagtctcttatgagcttttgtatttctgtggtatcagctgtaatgtctcctctttcatttctgattttgagtcttctctctttgtttcttaggttagctaatggtttgtcaattctacctttcaaaaaagttttagtttaatttttttcttgtctctatttcatttatttctgctctaatctttattatttccttccttctgataacttagggattaatgtgttcttcttttttctagttccttgaagtgtaaagctagattgtttatttaagatctttttttattttttatgaaggcatttatcactattaacttccttcttcaaactacttttactgcatctcaaaagtttgttatgatgtgtgctattttgatttgtctcaagatatttttaatttctcttttgatttttttccttgacccattagttgttcaggagtttgttgtttaattttcacatatttgtgaaaactgaaaattcacaggagtttttcagtttttcccctggtattgatttgatgacaaagtcattatctttcataaaatgatatttcatacaattgcaaagagaataataaaactttttgtgagaatataaactgcaggcaatttaaagaatatctttggaacattgcttacatgtgtcctcccatatatgcttttactcccacagttctcatttcttttagactacatttttacaacagctccatacaatgtatctgattctaaccctttaaccttctttcaatataccatacacactgtcatcaccttcattgtcaaatctgctacctgaaaaaaatatttaaaaagtcccattcataacagaatgaaacccaaactccttatcttgctatgcatggtgcttcatgatctggtatcaacatgccttttaatctctctcaaccaccatttcccctcatagccktttgttccagccaaacaacatgttttctactgctcaaacactgtattttcatatctttgttgttggctcagcctgcaccctaaatgtggaatgacctttcacaaatcttcttaaatccaacttatctgtacccagatgagctagcaaataaaggtttaaataagtaaagaatttagcttttatcatgtaaaaaggaggtccagacatgaccatctattgctggtaaagtgttttcacagaaccctggggaactcttgacttcttttagattttatacttccgcttcttgcctaatggttgcaaaattactgcttcacccccaatactacactcacattccagaaaggaagtggaaaaaaatagagaaaacagcatatggcagccaagtcttatcaccttttttaaaatttccctacacagcaacttccaaatatatttcattgggcataattatatcataactaatcttagctacaaagaaagctgacaaaatatttcctagtcaaaaaatgttgtactagtgaggaaggaaaataaggtgaaaccgatatgcattcagmaatgttggccttaatatttgtttattttcataattgtcttctcctggttgtctggaacttcaaagtcatctttgtaccttctagtgcagcatgcacaaagaagatacttattatatatttgagtaagtttaactttataaatgacaagggaaagagaaccatttttgcatttaagcatgattgtattccatcgtaatgaaagcataaacttagataacttgatcaagagtaagcaaactactgcctgggggcaaaatgtcgcctacattgtttttgtgcacaccatgaactaagaatagttgatacattcttatagggttttaaaaaataaaaacaggaatatgtagcagggactgtatataaactgcaaagcctaaaagatatgccgtccggcattttacagaacatatttgccatcccttgacacmggttaaaatgtactacatttcttttttttagtgttatttaaggatctagttgtattattccagggtcattggagccatctttgtcttttgaaacaatgtatgtgagaaaacttgccagccaaccctttctcttgtcaggaaattcaaatgtcctacccattccacagagaaactgatgttaggacttccataatgctcctcactcagacttatgagctaaatttccaggtttgaaagtrcactataatttttgattatttttaagtaatagtgttctcctaccactatacaaatttaaagaaaaaaattatagttccaaagcagaaataagcatgagagccaattaattgtatttcacacatgcaattattggataactctatatgtgaagctaaagggacaaagcaatatttttcctattgactctgctccataacttgactaaattatccaagccaatgatytgaggaagcatatgtgaaaccacctagaagtattttactttcatgttgtgtaaggtatattttaagttatcttaatgttgcataaagtcttcccataatctcaagaaggacagggagcaattttatcttacttgtcactaaatcccccagtgcctattgcagtgcctggaagggattttataagctgtgtgtgtgtgtgtctgtgtgtgtgtgtgtgtgtgtgtgtgtgtgcgtgcacatgtgtacatgcattcctacttccccttcatctcaaggcaatgaagtattgtttccattgtcatatgtcaccttctgttaatgatgagcagatcactacatggacgaagttaaggagctctacttctcgcatataaattctacttttcctatgtaagttctacttcatccacgtaagtttagagtgctggaaaataacatatgaagaaagtaaaatgtaaaacattggcatggtttctgaaggtcaaatatatagtcactaatggaatcaggatcaacaccgttgctcaagcataataccacggtgtctctgtttcactaagtttcctctcctgtaaatagtccatgtccttaaatttgctggatttttttaataaaagtaagtcatgtaatcccaagtaatatgaaggtatacacaagtactccaaaaaggttcagaataaagtaactgaagtaacaaggcacactctattgatatgcattaaaacaaaaaatctcaacaaaccaagcaagtttcttgcagaacctaaggacttctatatttcattaagaaaatgtattgtaaaggtaaaaaagcaaatgatagaacagaaacagcgcaatattctgaattgaagaaacagtgcratattctgaattacagtggtctttaagtaaataataagcattaatattctcttcataaagacgagtttactaatttagtatcataaaaacattttttttcaaaagccatgtccaagtgggcaccagttaaaataggacaggggtgattgttacactttcaatttgtggaacatttttcttccttaaacattccagagcttttatgcaaacataattattaaagtgcatatgtcattggttctgaacttaatatctgaattttctgtgagaaaaacaaggaattcttttcatttggatcctgactcagcacttacatcccatttacttttagtcactgtgtttctgcttacagtatgtgaaatactctcaccagaacaaaggtcccagcgtcaataagtcaaaccgcagactctgacagctgagtgaatagcagaggccagagtccacttgaagtgttcacactctcagaggccragtttagatcttatctgcctgagattccttttaacactgatttgtcatagcaggtagctgacagcatctactcctgaagaccggaaayatggcttgtaccatccaaaaggcagaagcacttgacggggctcatttgatgcagatcctctggtatgatgaggaagagtctctctacccagctgtatggttgagagacaactgtccgtgctctgattgctacctggattctgcaaaagcacggaaacttctagtggaagctcttgatgtgaacattggaattaaaggcttgatatttgacagaaaaaaggtaattatctctaaattatgtctcccttctttctcaagttcaataatggggctagtcaacaataatttagataactcttttttatttggtcacgcayatataaccgcatatgaacccacgtttgtatagtacttggtgcgaattaagtatattcagtaaatggaagcttcagctattattattactattatcattactactactatttttaataaaatttgcagtgttacttgtcttttagtcaaattagtatgtagagatacaaggcttgttctgggattcccaaaagcacagctctcaaaactacaaaccagaggcagccaccattccatgtttctctcttccaaatttactaggattcttattatgctcttgtccacatcccgacttgaggactttactcccagatttcactgcttgctagctagatagaaatgttgtttactctyacatttctcacctgaaaaaaatgagaataatagtagtaccttccccctagagttgtaaagattaaatgtgttatgtctatagtacttgttatggatactcaaaatagtgttatttttattattgctgttgtactccttatcatcactactattacttacttttatttatttatttttgagatggaatcttgctctgttgcccaggctggaatgcagtggggcgatctcagctcactgcaacttccgcytcccgggttcaagcaattctcctgcctcagcctcccaagtagctggaattacaggtatgggccaccatgcccggctaatttttgtatttttagtaaagacggggtttcaccatgttaaccaggctggtctcaaactcctgaccttgtgatctgcctgcctcggcctcccaaagtgctgggattacaggcataagccaccacacccagctgcaccattactatttctaatactcttggcaggaatcttaattgacaactagcttcagttatcacagaawgtttggggatcccaggtttagaggatgtaggtcaagaactgtagatctatccatgctctatttcttgagtgctatttaagggcctcagacctcagatgtattactttggcttccttgttttccaaaagcgtatgcttaatctctgtcttaaaaattaagctggccaggcatggtggctcacgcctgtaatcccagcactttgggaggctgaggcgggcgcatcacaaggtcaggagatggagactgtcttagccaacatggtgaaaccccgtctcaactaaaatacaaaaaattagccaggcgtggtgtcgcgtgcctgtaatcccagctacttgggaggctgaggcaggggaatcgctggaacccgggaggcagaggttgcagtgagccgagattgcgccactgcactccagcctggcaacagaggaagactccgacttaaaaaaaaaaaaaaaaaaaaattaagcaaagcataattggattccctgattatcttaaacagcattcaaaaacagagcaatagtggagaacggaaataaaatccacataggtgaaatttgctttttgtgttataaggtgtacatcacatggcccgatgagcattacagtgaattccaggctgattggctgaagaaaagatgcttttccaagcaggccagagcaaagctccaaagagaattgttttttccaggtaactttgccaaagtcttcaatgtctttttaaacccttacagtaaaggatttttattaagaaatttgctcacagaaaattcaaacctttgtgctttgattaaaatatgtgacatgtaaattatgtggtgtatttaaagttttaccgacaaatatcatttgggtagagatgaaaaggagtatagagtaattctagacattctacagagaaagaaacaaaataagtccagcaaacttgtgtctttgtcatctaaagcaaaacctggcacagcataccacagacactccgtaagtgttcactacaaagaagcaggatgaactagaggcagactggccctttataacaattttgtctaaggccagaacaacacaaatcaacaaagcaagaattcctaacctggtattcatagatggaattatgggattgatgaacccatgaaacggtacgmatagcactgcaaatgccagtgagtgtgggacaatttgtctgtgtgtgtgcatgtacacacacatgcacacaaagccacgtttgtctaggaagaatttatataggtttcaaggggatccataaacagaacaatgttcagaaaaactgcaagggtggattcagtggataaagaggactttattgctgagcaaagaagcaaaataaatacttaaaacaggtggaaatatttttaaatataaattttaggagatacacagtaatagaactcaagcagaggaactggtaaggagtaagggctgtttacaattcattctctgcctattttgaagatttattacatgaaactatgtgaatcaaagatagactgaaaaacagttcttgcaagatctggtcatttaaaagtgtgtagcactaccctctctctcctgttcctgctttcctcatgtgacctgcctgctctcccttcaccttccatcatgattgtaagttcctgaagcctctccagaagttgagcagatgtcagtgccatgcttcctgtatagcctgcaaaaccatragccaatttaacttcttttctttataaattacccagtctcaggtatttccttataatgatgcaagaacaaactaatacagaaaattggtcctgagaagtgaggcattgctataaagatacctaaaatttagaagcagctttggaactgggtaacaggcaaatgttggaagagtttggagagctcagaagaagacagggtaagtttggaactttgtagagactggttagatggttgtgaccaaaatgctgatggtgatatggacagtgaatgcctggctgatgagttatcagatggaaatgaggatcttattgggaagtgaagcaaaggtcacatatgctatgccttagcaaaagagcttggctggattgtatccatgccctagggatatgtggaagtttgaaattgagagtgatgacctacggtatctagtgaaataaatttctaagcagcaaagtaagtgtttaagaagtaacatgactgcttctaacagcctatgatcagatacaagagcaaacaaataagttggaactttaaaaggaaagcagagtgtaaaagtttgaaaattttgtaacctattcatgtctaggcagagaaagaaaaagcttttttgggagaggaagtcaagcagactgtggatcaaccacttattagagatatttgtatakaagaagaagccagtgctaatagccaagacaacaagaaaaagccttcgaaggcatttcatagacctgcacagcagcctctcccatcacagacccagaggcctaggaaggaagaatgctttcctgggccaagggctccactgccctgtgtgtagcctcgggaggcagctcccacatcccagctgctcccactccagcctcggctccaaggggcccaggtacaggttgggccatagttccagagggcataagctactgtaagacttggtggcttccatgtggctttaagcctgtggccgcacacagtgcaagaatgaatgaggcttgatgttcgctgtctagatttcagaggatgtattatgttggtgcaaaagtaattgcggtttttgccattaaaagtaatagtaaatataagaaagcctgggtgcccaagcagaagcctgctgcaggggcagagccctcacaaagaaccctagggaaatgcagaggaaaatgagttggaggccccacttagagtcctcactggggcactacctaatggagctgtgggaagaaagccactgtcctgcagactccataatggtagatccaccgccagcatgcatactcagcatggaaaagycacaggcactcaacgacctgtgacagcagcctctggagccgaactttgcaaagccataggggcagagctgcccaaggcattgggaacccatcccttgtaccattgtgtcctggaggcaagacatggagtcaaaggagataattttggagccttaagatttagtgactgccctgctgggttttggacttgcatgggccctgtactcccctttcttttggttgatttctcccttttgtaatgagaatgattacccaatgcttataaccccattatatcttggaagtacataaattgtctttaatttcacaggcttatgggtggcagagacttaccctgtcttagatgaaactttaaacttcagacttttgagttaatgctagaatgagttaagactttcagggactactgggaaggcatgactgtattttgcaatgtgagaagtacatgagatttggggggcraggagcaaaatgatatggtttgcatgttccacccaaatctcatgttgaactgtaatctccaatgttggaggtggggcctcgtgggaggtgactggatcacaagggatgatttctcatgaattgtttagcaccatcctgttggtactatcctcacaatagcaaatgagttctttgaagatctggttgttttaaggtgtgtagcaacacctcccttatctgtttctcctgcttttgctatgtgatctgcctgctccccctttcagcttccatcatgattttaagtctcctgaagcctccccaaaagccaagcagatgtcagcaccatgcttcctataaagcctgtagaacagtgatccaattaaatcccttttctttatgaattacacagtctcaggtatttatttatagcaatgcaagaacaggctaatataccagccttgttgagttttgtaacacctctcctggaaattcttagccacataccaagagagagattttaccttaactcctttcaaatctgaaattcttaaacatgtgtggtaactctccgtggctttaaatgagacttatgacactttactaggtatgaagatgttactaatcaacttgaaccaaataggttcaccatttcttctggttatcaataatagagcatgatactgtcccctttctctttaagcatagaccagccatgtcaagaatttggttcctccatttctttagtctcaccattctgatggctgacaaggttttgtcctagtgctttctctctaaactaccagttcatttttccctgtatctagctggttaaatccagatgggtatccagggaaagatgtttttattgccttcctccaatgagtgcattgctaaattcttcaaggagtctccaattacataatttagtaccgattgtctgggtcacatcgcagtgtcacaaatgtatttttttaaatttattttagacttcttctggtactcaaaatatttttccttaactctgctctaattttataatcctattggattttactttcatttccttcaagttctccttttgattttttcaggaaatacatgccaactttttattattacagcttaagcttttaagcattgtaaaaggatatggacatcctcctccattaatatttcttgatgagtgcagttttatagcttacatttttcagtactatcgggcagtagcaaaatggaaatgatactacactcaattaagtagtggaaaaaactggtcacaatgacaggctgcaatcatgaataatataagaactggctgctatttagacactggaaaatattttaatagtttaaaacaagatcagatttttaaamtacattctcaagctgtgcagttggtgggtaaaaaaaagaaattaatgagccatttttggaatattggttctatggctttttgcctgtagaatttgataccttatttcattgccattgcagattttcaaacatttatattccagagcatgcaaacaaactcagttacatttgtgaaaggattttgttttttagtcccagtagtaatgttttctcttctgcaagcataacccttggagtgagggttacagagcttttaaaatctggaatcaagatgcagacaatttttccttgatcttmcccctggcactcgctgttgaactcaaaaatgacaagacaaatgatcatcatccaaaaaacttttatcatgggacacagtcatagctgaaaggaagacacggataattatcactccctcataaatttctattcagttgcacatatattgggtatctattttgtgccaggacctctgtaaggaaatatcaagattttyttwwaagacatagattctctccttgaggacttatcaagtctgaaagggaacaatagccatgagaaaataagtataagacattacttgaagtacattaaaaccacacatagaaagttaatgatgacacagaagaaggaacttgaagggatraaggaatgatcctcagaaatgaggtaatacttgagttgcactttggagaatcaatcagtttgtcaggcaaagatagatagaaagtaaggaaattctcaacaaagaaaaaggcaggcagaaaatcatcaaagggtaaaatagtaggataggtttggaaaactgcaattagtttaatattggtgaagttaaaattgttaggcaacagagaagaaggaaggggccaaaccatgaagtggcttatatgccctgcttggtcctaaacctgcaggcgattaagagttttcccaacaagggctcagatatgccatccccttagcttctccatactgatgctcttcttttaaagccagagaaatgagtttaagatctttataagtttaagaagatgattgctttcattttttcatctgtattttacattttccgagttgtgtctttctgattttaatcaaatgaacataacttctcaaatgcctacaagtttgtacatgtctcctaggctttctttttcttttttttttgagacggagtcttcctctgtcaccaggctagagtgcagtggagcgatctcggctcactgcaacctctgcccccgggttcaagtgattctcctgcctcagcctcccgagtagctacaggtgctacaaggactaccggcatcacacccagctaatttttgtatttttagtagagatggggtttcaccatgttggccaggatggtcttgatctcttgacctcatgatccgcccaccttggcctcccaaagtgctgggattgcaggcgtgagccaccgcgcctggcgggctttctttttttcttcttgcattctcccttcctccacagtgcacctgcttggctcttggcttatatttaccccacaaaagagagtgaagtaatcacatctgtgttgtagaagggccttgatcgtggctctgagtttggatggaccagcatagggagtgactggggtcagggtaaccgtagcatgacctagaaatagtcctgtaaaagacaaagaaattttgagaggcagggaggatggaggagggtgtagaatctgtattcaaaaggaacatatatgacctgtaggacagcaagttgccggccatattctctagtctctctcaactgaaatcctaacacttgaagctcagcagtacatgtttccaaacatatgggtgaaaatggaagactttaaatcatattagagacaaggtttttatgtactaattataatttagctctcgtgaaattttggcataattatatgctcatttttgtcactaactttgagatgcaacattcccaacatataactggcaggaccaaaatggaaaaaaaaatcactatatagtatgatatacatatgaagctaaatatttgttctttttattaatcctcaatatcagaatgatagatgcttgattatctctctgaattggtactgaagtatttttgtattaatctctaactttaataatattttttatagaatattgagatttaaaaagctataacttgaagaaaatattttatttccatggagacaggctgctcagttttctcagcaatccagggatggagtacattgcacagtcaaaaaaaaaaaaaaagaatatttccccacaattctttatgcctctctcatggcagtctttaccatctactaaatcagattatagcccttcagtctatagctataacgcactcctttgtttcaaaagtagcattccataagaggaagtgaaaactcacaaataactgttaggaccctctaaaatctattcgtcttgtacatggmaagaaaaagtagagagttcttcctttcttgcagagaaccatatatttacttgaagatggagactttatgacagtgcaaaaaccagatttggtttggtgcagaggccatttttacaaagcattgtcataaagcaaaaatcttgtgtgtttttcttaattcaattaatgtacaaaagaaatatgcctcgcccatgtgatattttgcccccatctctaagccttgctacatccattcttgaattctcagaggtgggagcctgcaatgcaaatcagggatggggtaagtgtattgtttcactattgtttggtaattataaaaagaactagcaagacttggtgggttgttgttttttttcaagctgcgttaggatgtcccaacagtatcagggctgccaggtcagaatggcttccaaacagccctgtcaaaacagctgccttagagcaattaagccaccacatcatcttccgaaatgcattccattcccaagagagactaataaagattccttccctaaagtcacccaaactcataactcagatacacaggtgggagaatagctcactggatttatatgtttaagaagcatgtctttgttctgttttgcctgtcatatgcaaaatggacctactgacttgcagagaaatatctctaggttttctgtgaaatgaatatagctatctcaaatgcatgtgactttattataactgtctgaggggttcttcctgcctgctgctcaaagaaagaccatggttttacagtaaaaaaggagtttaatagacatgaggccagccatgccatgggggagatggagttagtcctcaaatcaatctatccaacgctcataggttagragtttttcaaaggcattctgggaaaggagtggcagcgactaggcttgctgctgatttgtttgggcagagatgaaatcatagggggtcaaagccatcctcctgtgggctaaatcatttctgagtggggccacaggggcaggattggtgggtctaggtagacccatggggtccagtggagccataggtgtcagacaaraaaaaaaaaacaacraaaaaaacatctcaaaggcccatatacaatagtggtgttacctgcaggaatggctgacaatctgtttctatgccttagcagaatcaggctcctctctttcccctaacctgatggtctttcattagttttgcaaaggccattgagttcttggggaaggcctattcccatttaaaactataaattaaatatctctcamagacagcttagcctaagcccaggaatgattaagggaaaggcaagatggaggaggtgggttagatcagatctctttcattgccataattttctcactggtataattcttgcaaagggacctattgactttcagagaaatatctttggggttttgattaagtgaatacagctatctcaaatgcatgtcaatttatgaatgtgtaccttgcttcatttttcctctgtgccatattgatgtctttcaatgtgtcctattcttttctgaattatatgtaatctattattctcattttctgcactgcacttggtaaaatcaggcataacatctaaagagtctaacgtacctatgcaagatggggctgcccttgttctgactgtaaacctaccaggggagactcagaacctgggaagcacactgcagtgycctgtgcttttctcaggtgccactaatctgcaggttgctcccgcaaaatctgcctaattttgggcttcatttgtaagctcyagataaacttatcttcctctttccttttctaaactccatccatacttccagctagaaaacacataccacatgttcagatataaatattaaaaataagtctattttactagatgtattgatgtattaaataaaattttttaaaagcctgtatactactacatctattactttttaaatgcttgagtaagaggtatattaattatattcttcttcaaaaattattttctcattacttaacaacttcataagacaatgttagtgctagacgggaccttgaaaagctggtatcttaaaatatttaaaaagccttggcaaagtttgaggatatctttgagaacctaaagcaaatatatttccagaaataattattacagtccattccctttttatacctttttagtttagttgccacattgagaattaaggaaaatattctaatgtttttgctcttggaaaaataattttttgtagttatattaaagtaaagttattactttttaaacaaggaaaacaaaatagaatgggctttccttagtgaatgacgagctccatttctacaagctaggcttttttgtgtttttgtgtgtgtggttttttggtttttgttttgttttgttttgttttgttgcagcccaggaataagttttataacattggcagttgggctacaagtttagaacttatacatttagaaaattccaaagtgttccaatttccaaaagtaaagttggaatactttctacactggcttcaggtttaccaaatgtacacataagggataaatttgtcctgccaattttgctagtgcctatatatcagcagattcgccagacaataaaaaaggggacaattgattcaaaaaccattacctctcacttctggttccactttgcttcaaaatggcagaacatagaattacacagcgttaggtttggagttgcagttatcttcagcacacttaaatttcttcttttagattttagaaccaaacttccaaatgtgcccatccatggaatacatggaatagctctgggctatcccttcaggggaaaaaaaaaaaaaaaaagaaaaaaaaccattttaagaatttgttgatgtttacgttcatacatactattgatttgccaattttaagaatttgttgatgtttacattcatacatactattgatttgcctaatttctggcttagcaaattaaataaaaatgtttaagttctactctatccaaaaatcatctcctttttctttctttttttcttaaaattttatatttttctcaatcagtaactttgttattaatcaataagaaagtagggcactgaaattaagagggtttttggccctaggccttgctaagtctgtgattttgagcaacttacttaacctttctatgcttcaatatccttatctgcacaacagatataataatagtatatacttaacttctcaagcagtgcaatgttgggtgaagggtagtgttgcaccatacatatcaactcattatttttttcaaaagatttccttgaaagtggttgtaagtaattatagacagcaactctgagagttttcttttttgtttgttttaaaataggtttatttctttttttaattttatttcaatagcttttggagagtgtttttttattacataaatgaatagcacagtggtggagtctgaggttttagcgcacccgtcacccaagtagtgtacgttgtaacgaatatgtcattttttatttcttacctcttctcacgctcccacttctgagtctccaaagtccattataccaccactctgcttgcttttgcatacccatagttgagctccgggccaggcgcggtggctcacatctgtaatcccaggattttgggaggccaaggcaggtggatcacctgaggtcaggagtttgagcctgaccaatatggtgaaaccccatttctactaaaaatacagaaattagccaggcgtggtggcatgcgactgtagtcccaggtactctggaggctgagacaggagaaytgcttgaaccccgaggctgagacaggagaattgcttgaacccaggaagtggaagttgcactgagccgagatcgcgccactgcactccagcctgtacgacagagcgagactccatctcaaaaataaaataaaataaaaatttttaaaaaacatagttgagctcctgcttgcaagtgaggacatacagtatttggttttccatttctgagttacttcatttagaataaaggcctccagcttcattcaagttgctgcaaaagacattattttattctttttatggttgagtagtattccatggtgtgtatataccatattttctttatccattcattagtcgatgggcacttagattggtcccataactttgcaattgygaattgtgctgtaataagcatacattttcaggtgtcttttttacawgacttttttcctttggggtagatacccagtagtgggattcctggattgaatagtagttctacttttaattctttaagaaatctccatactsttttccataaagattgtcctaatttacattcctacccacagtgaacgcttcccttttcaccacatccatgcaaatatctgttgttttttgactttttaataatagccattctggtgagggcaaaatggcatctcatggtggttttaatttccatttccctgatgactagtgatgctgagcattttttcatgtttgttggccatttgtacatcttcttttgagaaatgtccattcatgtcatctgcccacgttttgatggggttgtttttttcttgctgatttgtttgagttccttgtagattctggatattagtcctttgttgggatggatagtttgcaaatattttctccctttctgtgggttgtttactctggtaatttttttttcttttttgctatacagagctttttagtttaataagtccccatttatttatgtatttttgtttgctacatttgcttttggggtgttagtcataaattctttgcataggccaatgtccagaagagtttttcctaggttatcctctagaatttttattatttcagatcttcaatttaagtctttaatccatcttgagttgattttttataaggtatgagatagggacccagttacattcttctatatgtcgctattcagtttttccagcaccatttattaaataaggtatcttttccccaatttatagttttgtatgttttgtcaaagatccattggttgcagatatttagctttatttctgtgttctctattctgttccattgttctatgtgtttacttttatatagtaccatgctgttttggtaactatagcattatagtaaaatttgaaatcagttcagatgatgcattcagatttgctctttttttttaggattgctttggctatttgggctcttttttatttttttggttccatatgaattttgggatttttttttctaattctgggaagaataatgttgatattttgataggcattggcttgaatctgtagattgctttgggcaatgtggtcattcttaaaatattgagtcttctaattcatgagcatgggatgtgtttccatttgtttgtgtcacgtatgatttctttcagcaatgttttgtagttctccttagagagatctttcatctccctggttaaaaatattcctggattttgttttgcagctattgtaaaaaggactgagttcatggtttgattttcagtttggttattgttggkatagtagtgctactgatttgtgtacattaattttgtaacctgagacttcactgaatttgcttatgaaatctagaagtcttttggaggagcctttagggttttgtaggtatactattttatcatcggtgaacagtgataatttgacttcctcttttccaatttggttgcccttttttctttctcttgtccaattacccaagctatgacttgcagtactatgttgaatagaactggtgaaagcgggcatccttaacytgttccagttctcaggaactggaacttttaatttttaaccttttaacttttaawttttgcttttaacttttaagttatgcctttaacttttctccattcagtatgatgttggctgatggtttgttatatatggcctttattcacctcctagcattttgaggtacgttccttcaatgcctagttcattagtgggggttacctaaagggatgctgaattttatcaaatgctttttctgcatctgttgaacttttgtttttaattctgtttatgtgatgtatagtagtcaacatctgcatcacagaggttttcataacttgtgtcaataatatcattcatttcaaagaatttttaaatttccatcttgatttcattattaaccccaaaatcatttaagagaagattgtttaatttccatgkgtttgtaytgttttcagggttccttttggagttaatttccagttttatyccactgtgttctgagagggtacttgatataattttgattttcttaaatttattgagaaatgttttgtgaactattatatggtctgtcttggaaaaccttccatgtgttagtaagaatgtgtgttctgcagttattgggtagaatgttctataaatatcaggtccatttgttacagagtgtagtttaagtccattgttgctttgttgactttctgtctcagtgatctgtttagtgctgtcagtggggtatcraagttccccactattattatgttgctgtctgtcttacttcttaggtctaacagtaattgttttataaatttgggagctccagagttagaggcatatatatttaggattgtaatatcttcttgttggattgattctttcatcattgtataatgaccctctttcttttttgtttttaatatagttgctttaaagtctgtttaatctgatataaaaatagctacttctgctcgcttttggtttctatttgcatggagtatcttttcccacttctttaccttgaatttgtatgaatccttatgtgttaggtgagtctcttgaagacagaagatatttggtttgtgattgattttttttttttttttttttggtccattctgccaatctgtatcttaagtggagcatttaggccgtttacattcaatgttcatgtcgagatgtgagatactttctccgtcatcatgttgattgttacctactttattttctcattgtattactgttttataggcctgtgagttttacgctttcaagagattctattctggtgcacatcaaccttttgtttcaagttttagaactcctagcattcttgcagggcttgtctagtagtaacaaattgcctcagcatttgcttgtctgaaaatgactttatttctccttcatttatggaacttagttttgcaggatacaaaattcttgcctgacaattattctctttaaagagactaaagaggtcaggtgcggtggctcatgcctataatcccagcactttaggaggcaaaggagggcagatcacaaggtcaggaaatcaagaccatcctggctaacacagtgaaaccccatctctactaaaacaaaaaaaatgcaaaaaattagccaggcatggtggcaggcacctgtagtcccagctactagggaggctgaggcaggagaatggcatgaacctgggaggcagagcttgcagtgagccaagattgtaccactgcactctagcctgggcaacagagcaagactccatctcaaaaaaaaaaaaarggggctaaagataggatcccaatccctttgggcttgtaaggtgatattgtttggctctgcgtcctcacccaaatctcatgtcaaattgtaatccacacgtgtgaggagaggcctggtgggaggcgattgaatcatgggggctgacttcccccttgctgttcccatgatagtgaatgagttctcataagatctatggtttaaaagtgtgtggcaccaacaaaaaaaagagaattttagaccaatatccctgatgaacatcgatgcaaaaatcctcaataaaatactggcaaaccaaatccagcagcacatcaaaaagcttatccaccatgatcaagtgggcttcatccctgggatgcaagcctggttcaacatacaaaaatcaataagcataatccagcatataaacagaaccaaagacaaaaaccacatgattatctcaatagatgcagaaaaggcctttgacaaaattcaacagcccttcatgctaaaaactctcaataaattaggtattgatgggacatatctcaaaataataagagctatttatgacaaacccacagccaatatcatactgaatgggcaaaaactggaarcattccctttgaaaactggtcacaagacaaggatgccctttctcactactcctattcaacatagtgttggaagttctggccagggcatcggtcaagagaragaaataaagggtattcaattaggaaaagaggaagtcaaattgtccctgtttgcagatgacatgattgtatatttagaaaaccccatcatctcagcccaaaatctccttaagctgataggcaactttagcaaaatctcaggatacaaaatcaatgtgcaaaaatcataagcattcttatacactaataacagacaaagagagagccaaatcatgagtgaactcccattcacaattgcttcaaagagaataaaatacctaggaatccaacttacaggggacgtgaaggacctcttcaaggagaactacaaaccactgctcaacgaaataaaagaggacacaaacaaatggaagaacatttcatgctcatggacaggaagaatcaatatcgtgaaaatggccatgctgcccaaggtaatttatagattcaatgccatccccatcaagctaccaatgacttcgtcacagaattggaaaaaactactttaaagtttatatggaaacaaaaaagagcccacattgccaagtcaatcctaagccaaaagaacaaagtggcaggcatcaagctacctgatttcaaactatactacaaggctacagtaaccaaaacagcatggtactggtacccaaacagagaaatagaccaatggaacagaacagagacctcagaaataataccacacatctacaaccatctgatctttgacaaacctgacaaaaataagaaatggggaaaggattccctattcaataaatggtgctgggaaaactggctagccatatgctgaaactgtatctcttccttacactttatacaaaaattaattcaagacggattaaagacttaaatgttagacctaaaaccatataaaccctagaagaaaacctaggcaataccattcaggacataggcatgggcaaggacgtcatgtctaaaacaccaaaagcaatggcaacaaaagccaaaattgacaaataggatctaattaaactaaagagcttctgcacagcaaaagaaactaccatcagagtgaacaggcaacctacagaatgggagaaaatttttgcaatctactcatctgacaaagggctaatatccagaatctacaatgaactcaaacaaatttacaagaaaaaagcaaacaaccccctcaaaaagtgggtgaaggatatgaacagacacttctcaagaagacatttatgcagccaacagtcacatgaaaaatactcatcatcactggccatcagagaaatgcaaatcaaaaccacaatgagataccatctcacaccagttagaatggcgatcattaaaaagtcaggaaacaacaggtgctggaaaggatgtagagaaacaggaacacttttacactgttggtgggactgtaaactagttcaatcattgtggaagacagtgtggcaattcctcagggatctagaactagaaataccatttgacccagccatcccattactgggtatatacccaaaggattataaatcatgctgctataaagataaatgcacacgtatgtttattgcggcactattcacaatagcaaatacttggaaccaacccaaatgtccatcaatgatagactggattaagaaaatgtggcacatatacaccatggaatactatgcagccataaaaaaggatgaattcatgtcatttgtaggaacatggatgcagctggaaaccatcattctcagcaaactatcacaaggacaaaaaaccaaacacttgcatgttctcactcataggtgggaactgaacaatgagaacacttggacacaggaagggaaacatcacacactggggcctgttgtggggtgggggtaagggggagggatagcattaggagatatacctaatgtaaatgacgagttaatgggtgcagcacaccaacatggcacatatatacatgtgtaacaaacctgcatgttgtgcacatgtaccctagaacttaaagtataatataaaaaaaagtgtgtggcacttcccccattgctctttctctcctgacaccatgtgaaaaagatgcttgcttccccttcaccttccaccatgactgtaactttcctgaggcctcccagtcatgcttcctataagcctgtggaactgtgaatcaattaaacccgctttccttcataaatcaccctgtctgaggtagttctttatagcagtgtgagaatgcactaatacagaaaattggtactgggggtggggcactgttataaagaaacctaaaaatgtggaaatgactttggaaacaagcagaagttggaacagtctggagggctcaggagaagacaggaagatgtgggaaagtttggaacttcctagaggcttgttgaatggttttaaccaaaatgctgatagtgatatggacaatgaagtccaggctgaggtagtctcagatggagatgggaaatttactgggaactggagtaaaggtcactcttcagcaagaagaaaggcagcattttgcccctgccctagagatctgtgtaactttgaaattgagaaagatgatttagggtatctggcagaagaaatttctaagcagcaaagcattcaagatgtgacctggctgtttataaaagtctgtactcatatgtgtgaacaaagagattagctaaaactgatagttacatttaaaagggaagaagagcataaaaagtttgaaaactttgcagtcatgaaatcttagcactttaaaatgatctcctttgactccatatctcccattcaggccacaagaggtggactcccaaggtcttgggcagctctgcctctgtgggtctgcagggtatagcccctgtrgctgctttcacaggctggcattgagtgtctgtggcttttctaggtacatggtgcaagctgtcagcggatctaccattctggggtccggaggacgtggctaatgtggtaccttggggatgttatagaaccctgtttttttatacttgccagaattatttttctgtttccttctcatttggatagactatttcttttaattattgttgacttctttttatttgactgttttatttcttttttcccctgaaggatgtgactttaatgtttatagtttattgcagccttattcagctcttggtgctttcaggggtgaagactctgtaagagtttctcattatagtctttgtatgatgactttctcagatgctggctgtagtaatgatgtgcttggtgtatgactaagttcactgtctcttatgaggttggaatagcagaggtctctttaagcttatctcattccccaatggtatgcacatttttgtttatttttccccagtaggagaggtatccctgcatagaaaccagctgtggctgaagcagatgggtaaatgcaacacccaatcatcggcagaggtcccaatcttgacagaggtggctgggggagctctcagtgaaatgcactgagatcttaccagggggaaggatggcctctcccttgccaggmcagcaggaaagcaatccacctcccagtcacactcctgacccagtgctacagctattcaaatcagacaggcatctcttttcatctgcaggaatgaaattccaagtagagttgaatatttgatattccaagtagagacgaattgtgactctacccctcaggcaagcctgaacccagagggcactcctcttgtggggatccagtcaccctgaagtgttccagaaaggctgcctataggtgcactcatgctgaactcctaygggagaagccctagctgtgtctgcagtgattggcaggagggaaaagaattcctcttctccaggaccctttgtgagcacaagggctgcctgacagttggggcagagctgcagactttccccactgagcccagcactgtatctgtgcctctactgaaagacacttcccaccagcagaaagttctgggactcaaggcctgccatccagacttgtttatctcccaaggtgttctcttaatgtggtacattcactctccgcctaggagtaggattttctgagaaccagactactgtgaatgctgctgctcctctgggtctagccacctagtggggctgccacactccaggttggtgctgggaaatgtctgcaagggatccagtgatgtgatctgtcctctagtctcctagcagcagataccagcactagctctggtggagatgtcaggggagtgacgtagaccctataaagttccttggttataaataaccttagtgtgttggctttctcaaatgctggctgaagaagtaatgaactggtcacttgggcagactcaggacctcctggttagccatggtgctgcaggcaacggtgatagctgaggtaacacacacattttctccttcttgagcactgtgttattctacctgcagatgctgtaatggactgtgtcagttggcctccagccaggaggtggtacttgcaaaagagcaccagctgtgttagtagcagtgggatttgtgcttgctttgttacctaggggaggtattctgtattctcagacaatgagtggggccataaagctcccaaaactttctgtccattgtgttaagttaccagagtgggtggagggacaaagccaggtaggggctgggtcagacagggccgcactctggctctccacatgcagggcaagcagcagtttttgtgaaattggagggcagttctcttgccactagggtaatgttccagagagaagcacagctgtctctgctgcacagaagagtttgtgcagaaagtggggagtagcaggtggcaataagccccactcagctcccattcacttggcaaggcaggtctcagacttgcagtgctctccactagcagcagctagctaagtcctaagcagtctatgttcagaactccccagaagacagctaccatgactttcagatctcaccccttccagtccacccacaaagccagaacacccagctcctgcacctgtggcagcagcacatttcccacccacccttaagttctggccaagggtgtttgtctgcacttgagattatatcccgaatttcagttgggagcctctctcaacctgtgactgccacctgtgttagctgacagacttctgtcaggtaccctgtgaagtaggaccaaaaatggcttccctccatccatgctggagactgggaatgcacaaaagtcttcccactgctgctcctacttttatattccctaccactccctaaatcagctccagtgccgggtaggattaaggcctttccccatcggctgcattgccaggttccccagtggaagggtatatcccagaggcagtttatctgccctcgcactctggggacttacagttttccacctggcttacagtgaagactacagcctgccacttctttcaaagggcctgtggtttctttcagttttcctattaagttcctgtgttgcttcttggaaaaaagttcacagtgtgaatctctacacactatttcgtctttccaaaagggagaggcatactaacaatgtctccaatccaccatctaaaaaaaaaaaaaaaaccaaaaaaacagttttcttgaccctcttgaatagaatatttgttcttgaaaaatgtagaatattattattaaaattgctttctcattgtctcccattggctttcgattttattgcatatttgctatttgtacagagatgacttatatttaagttaggcttatggagggaaagattatatagattgtctctcttgccaacagcttagttggagccttttatcatcccatgtctgtattactgacataacatggcctctctgtccatacccagcatgcacaattctaagggcaatccccctgaggctcacaatcatctctcgttccccttgctcatgtgtctcattgcctacagaataaaattcttcactggggctttccaatcctcccacaatctggtaccccctccacgagcatgtggacttcttttattgtccaagttctgcttgcctcctgcatgacttattcttctctttctgactgctcaaactttacctagccattctacaagatttactcacatcctaatgaagaccttcatcaattattccaccctatatttatgtttatccctaaaccaagccacaaatatcaataggaaagaaagtaagcctaggaaataggcatcacttcactggtaacattgaaacagcaagtctttcatatacaaatgaaaacatacacatttttcttttcttttttttwattatactttaagttytgaggtacatgtgcacaacgtgcagttttgttacaatgtatacaygtaccatagtggtttgctgcacccatcaacccatcacctacattaggtatttctcctaatgctatccttcccctatccccccaccatggaatactatgcagccataaaaaaggatgagttcatgtcctttgcagggacatggatgaagctggaaaccatcattctcagcaaactatcacaagaacagaaaatcaaacaccacatgttctcaatcataagtgggagttgaacaagaagaacacgtggacacagggagaggaacatcacacacatacacatttttcaaaaagaattttgttagaatttgttagaagagaaggtaaaagagtgcactatatcaagaaagtgcttcactcatgaaataacatggtgttaacagaaagagcatacactttggagccagaagagctggttttgacctttttctgtgaacttgacttagtttcataaatgacctgagcctcactttttccatatttaaaagaggcgatgcctattagccttgggagatgaagaataagtgataaactgtaagtacttagcacagtgtctggcacactgtggatgctcaaaacttgttagatcctttctgtctcccctttttcttctagttaaagcgccataaacataagagmaaaggcacgttaaagaacatttgcgaaaaagacaggagagaagaaaagtgccttataatatcttatgtttgagctccccttacatgaagaacaatcatgttctattcctgattaagcacatgagagtatctcaaaggtggacaattgccatgaaaaaaactttagtcttacattggtttgatttctagcaaaaatttacckacctggtagatagtttcacttcaatagaattaaagaaggcagtgaagactggtcaattatgaacctaattccaatcaagaatatagaaatgtttggtgaagctggaatgaccagaaaacttggaagaaagtgatcctgtgttatctattagttagttaagaatagctacagatgaaaataccagcaatcataggctacattatatgtcacatatgtgctagatacttgaaaaagaaaaattccaaactgaaaattggtacaatctcatcatcatagaagagcagatctcaatagggaatataaaggaaaaatatctaaagaaaacaatatgcccatrtaatgaggaatcacagtctttaagctcaaacttcagtaaggcataataggagattctagcccagaataaattgatgaatcaagatatatgatgggcaatgatagaggggattattgaagttatttacttgaaacaataaggaaaaaaatgaggaaaaccaaaggaaaaattaaccgttgctgggagcagatgttctaagattaattctgctccacatacagcattttccatctcaactgatgatggcaactccatctctccagtagcaggcttacccttgactactgtttgtctctcaygatactcatccaacttattagaaagttatatttgctctatcatcaaaataawtcagaatccaaccatatcttgctgcttctactgttaacccgctgtccgcactaccaacatcatatgcccttcttcttcctcctatagcttatttcctattcccatcctgctctttctttttaaaaaatgctttaaaatcattttccatatgscagcaactgagctcagcacttaatatttactgcactgtttaatcctagcaataactcccaggcagcattattattgtaaccaytttatacacaaaaattaggctgatagaaataaataactagtttgtaatcaaagagacatgaagtatcagagccaaagtttgawttaagggtatctgaactattaaatgccttctattttcctcctcttctatgtgctcacagcaatttgtatgggtcctctctctgtcactaccattactacactgaatggtcattttctatagtatttgactctctttcacactagacagttaaaatctagagaaagaactaatattagtaatatatgtcattattgggcactttccatggattgttcatttattcattcatcatactcaatgagtgtctgctacgtactaggcactattctaggtactggggaaccagtggtgaacaaaataagagaaaaatcctgccccttagcagtttacattttggtagagaaagagacaaataaatgtacaaatatacctataatacatcaagtaatgataaggacacagactcaggcaggttgatggatgtggtggtagcactgtatggaaattctcttctgagtccttctgtcttttcactgaagtaagaatcaaagtcaccagaagagcataaatatgaggatgaagtgtggaagatttgaggatagaaaacataagaaacagtcagataggaacatgtaagttagagttaacyagagattacaataaaatcagtcatcctcatgtgttttcctccacatttagctgctttggttcaagtgaagatttaaccagacagcaggcacacgatsttaaattcttgatagatattatctcattcaaattttacagctccgtaggttgttctcatcctatattttccagataaggaaactgaacttagagaatttctcactttccaaaggtcatgcagataggaaatgttggaactaggatttgaatccagatttttcaccttcaaaccttgagttgttaaatttgacaaaggatcatatcagatgtagcctttattctcatctctatatgtgcttagtaagttctttttcaatgaactagcttcagaaataaagtacatgaatccaggagacaaatacttggctaaaaggcaattcttacatgttctggcaggctgaaaagttagtatgagtcatcagagtgacaacatgcagtatttggttttctgttcttgtgatagattgctgagaatgatggtttccagcttcatccatgtccctgcaatggacatgaactcatccttttttatggctgcatagtattctatagtgcatatgtgccacattttctttatccagtctattattgatggacatttgggtgggttccaagtctttgctattgtgaatagtgccacaataaacatacgtgtgcatgtgtctttatagtagagtgatttataatcccttgggtatatacatwgtaatgggattgctggatcaaatggtatttctggttctagattcttgaggaatcaccacactgtcttccacaatggytgaactaatttacactcccaccaacaatgtaaaagcattctgatttctccacatcctctctagcatctgttgtttcctgactttttaatgatcgccattctaactggcgtgagatagtatttcattgtggttttgatttgcatttcactaatgaccagtgatgatgagcattttttcatatgtctgttggctgcatacatgtcttcttttgagaagtgtctgttcatatcctttgcccactttttgatggggttgtttgtttttttcttgtaaatttgttgaagttctttgtagattctggatattagccctttttcggatggatagattgcaaaaattttctcccattctgtaggttgcctgttcactctgatgatagtttcttttgctgggtgccacagacttttaaatggccagatttcttgagaactcactcactattgtgaggacagcaccaagtggatggtgctaaaccatttatgagaaattcacccccatgatccaatcacctcccagcaggccccacctccaatactgagaattacaattcaacatgagatttgggtaggggcaaatatccaaactatatctctattctgcaattctggagcacacagaattagggtttaaaaggtatattgtgcctcagcagaagaaagaagctgtgacaattggagctgtttgaaacctgttccacggggaggtrtgtggcacgtcattgaaagggatgaagagggccttctgtgatctttttatggatgtcatagaggagagtcacaaggacagagastaaaacaattatctatctttcctgccaactctaaggaagtctgggataataatctttctttctgatatcctttggtgcgtgttttccttcaccatacaacccttttcccattgtcttcagtcaaattgtgtgggaatcctaaatctgacacatattgtctgatgctggacaaattatctaagctccttgtgcctttctcctcatcaataaaatgagaacaatgatagagtatctgttatgggattgttgtgagatttatataaattaatccatataaagtccttagaagggtgcatgaaatcataagtgctcaataaacgttaggttcattgttttttaaattatttttcatacactgccatttatggtttctttattattttacgtgtaattcttgttttcttcagatagatggtcattccagtcatargcrtgagtatacagactatgttagtattagtgtttcttcatcattttgtgttatttttrttttctccagctagatggtcattctgktcataggactgagcatacagagtatgtcaggttactaacagtccaacatgaaaatgtgtgtctctcctttcaagcaggttacacttgtttagaagccccacttgtacattctcagcaatactttcagagttttatggggttaccacctaaagattttatgtatttcktcatcttttaaaatagaaaagtgcactcagacacaatctcatttttcaggggttgctttgagcctctagtcatcattaggaaataaacaaagatttgttttgcatatagaccataaaagttttctgaaaaccttcagtgttgggctacacaagttggggaggaaggaaaggagcaatattggtgaaaaaataaagataagtgacatgatcctcataggtcatgargaacttacaatctagcggaagagacagagccttgcctgagccagcccttgcctacttttccaccttcatctggtacacgccctcttgccccagttctagccttggtgactgagtttttcaagcaagacaattcccatcttcccactgtccctcctacctaacactcttccccctgctctttgcatgacagtcttctctcatccttcagaatttggcataaatagcttctctttagcttggtgtttcttaatcaccatgtctaaatgaattccctatcccaatcccaagattcatttattattgttatacaccccatttgttaccctcatagcacttgccaaaatttttattcttatgtattaatatttatgtgtttgcttccttgcttttgcaccctttttccccaacaagagaagtgatcatrtctatctttattcacaaatgtaatctctttgcatagcaaggatttcaacaaatgtgttgtatgagtgaaagatttcaacataacataatgaggactgggactgaggtgctggagggccagagaagtcaggcaaccagagcacccttagcagttgcaggagatttccagaagggcattgcagagggtgccagtgccctgccatagccccttagcacttgtcacatacatgtcagcagcttcttgttgcaagactgctaatctcccctctctgcctgagacagcatgcttggccagcacacaagaaaggacaaaaagacccaggagtggatgcccagaggagcagctctcaaccaaaaaggggtaggcatgggtagcctgagcacctcagtgtcttttccccaagtaggaaacctctaaggtatatcctacagtgtccctatgaagtccagtgatgctgaacccctgttgccaaagcagtaaygtgttcattacaacacgttccagaggttttctttcctgtcttaattccccatcttctatgagtgtttctggatagactgcctcaataaatttcttgcattcaaatcttcatcacagggtcagcttcaggaaaatctcaacataaaagaagtgatcagaatcttgaaagacatgtagaattctttctacatgttaaaaaaaaaatctgaagagggcaggatctccatagtgcacgagaagaaaatcaaagctctgttttccactaagctgcctttcctctaggacaggtcagactttgtttttgtcagggcccctagaaggtatttacaggaagagacagtaagagattggctgatcccctgcatattcaataagctatttcagagccaacagctcagttcagtgcaggtggacagaaggtcctaaactcttgaaataacacattgcaacccagcatgctgtgctcatgaatctttaactaaagagcttctttgtgtcttttccttttttgaaatacagctcaggatccaggaatgtgatgcttaaccctgaaaaggaaaccttgtgcaaatggttccttgaaaaccagcatgtagcctgttcataaattttatgatgtgtgaagcacatgttcaaggaagtatttattagtaagaccataagttaaattaggaagggtggwtcatatcttaaatattccatcatttttcgtaatgtttatgtacccagacccaagtgtgaaacttaaatttgtttttaatgtattctcctgataaatgatttactctagtcaaatgtattttcttttggttccctggatagtcatgttttacagttgggggaagataagaaaatccttttaaattactctttcaacacatacaaagttaaaatttctgtgcagacatcatagaataattttcctgctggacttaataaaatgtagtatgatttcaggtatattagtacaggcatactttgttttattacacttcactttactgagcttcacagatactgcattttttacaaattgaaggcttgtagcaacacgcaagcaagtctatcagcacatttttccaacagcatgtactcactttttgcctctgtgtcacattttggcaattatcttagtatctcaaactgtttaattattttcatawctgttatagtgatctgtgatcagtgatctttgagcttactactgtaatttttctggggtaccataaccagcactcatatatgacagataatttaataaatgtatgtgttctgaccactttactgtccagccacattcccccatctctctctctctctctctctctctctctctctctctctctgggcctccctgttccctgagagacaacaatatttaagttaggcaaattaataaccccacaatgacctctaagtctttcagtgaaaggaagagttgcatgtctctcactttaaatcaagagctagaaattattaygtttagtgagaaaggcatgaaagctgagggaggccaaaagctaggcctcttgcaccagactgtcagccmagttgtgaagaatgcaaaggaaaagttacagaaggaaattgaaagtgctactccagtaaacacacaaatgataagaaagcaaaacagccttactgctgatgtggagaaagtttgaggggtctgaatagaagatcaaaccagccacatttccttaagccaaagcctaattcagagcaaggccctaactctgtttaattctgtgaagmctgagagaggtaaagaagctatagaagaaaagtctggcagtagcagaggttggttcatgaggtttaaggaaagaagttttctttataacatgaaagtgcaaggtgaagtagcaattgtgatggagaagctgcagcaagtgatctggaagatctagctaagatcattgatgaaggtggatacactaagtagcagattgtccatgtagataaaatgcctaatattggaaaagatgccatccaggattttcatagctaaaaaagagaggtcaatgcctagcttcaacactccaaaaaacagactgacccttttgttagggaccaatacagctattgactttaagttgaaaccaatgatcatttactattctgaaaattctaggaccattaagaattatactgaatctgttctgcctktgctctatcaatggaaaaacaaaacctggatgaccatacgtctatttacagcatggcttactgaatatttgttcaatagctgttgagactcactgctcagaaagagaagatgcttttcaaaatactacttttcactgacaatgtaactagtcattcaaaagctcttattaagatgtacaaggagattgatgctgtttttatgcctgctaacgcaacattcattctgcagcccagggagcaaggagtcattttgacttccagtcttatcatttaagaaacacacattttataaggttattgctgccacagatagtgtttcctctgatggctgtgggcaaaataaattggaaaacttctggaaaggattcaccattctagatgctattatgaacgtttttgattcatgggaggaggtaaaaatactaacattaacaggagtttggaagaagttgatttcagccctcatggatggctttgaggggttcaagacttcagcagaggaagtaactgaagatgtggtggaaatagcaagagaactagaattagaagtagagcctgaagatgtaactaaattgctacaatctcataataaaacttgaatgaatgaggagttgattcttttgaatgggcaaagaaagtggtttcttgagatggaatctactcctggtgaagatgatgtggacattgttgaaatgaaaacgaaggatttagaatactacataaatgctgtttataaagtagtggcagagactgagaagatttacccaaattttgaaagaagttccactgtggaaaaatgctatcaaacagcatcacatactacaaagaaatacttygtgaaagaaagaattaataatggagcagacttcactgttgtcttaagaaactkccacagccaccccagccctcaccaacttccactctgatcagtcagcaaccatcaactttgaggcaagaccctccaccagcaaaaagattatgactcacagaagactaagatgatcattagcaatttttagcaataaagcattttttaattaaggtatacrtatttttcagatgtagtgctgtttcatacttacagactacagtataatgtaaacataaattttatatgcattaggaaaccaaaaattctgcatgactcactttctttagctattcactttgttgtggcagtctggaacccaacccgcagtaactccaagggtatgtctatatccctgaaaattaaagcattttgcattcaggccactatgaagaatttgaaaactggttagtcacagcagcgtctgtgaaagtcatatttagcataatcaaatttaggagaggctcatattggtacacaggttctaatgggctatggcccttagtctctgatttcagcaaaactcctaactagagcactccaacagagagctatggttgaaaaagtatacattttgaagaactgaaaaaccattataaccacactgtgatggtaaagtcctgtaaaatcataattatttatactacagactatgctgcctattgtattgacagctgtgcattatcctagagtctctttgtgtgaatatggttaactttacacatctaaaagataatatattttttaaagaatataaatctttctgtatttttaaaacaaagtatattataggtgagtgtgtgtgggtgctattttataatggaaaaaaaagctcatatagaaacaaaaattcatcgaaacatgctatggaagtatgtagtgtgtgccctaatcagaygcttcacttcttgaatgaacaatgtagtcaaaatataaactcaacgtttaaagaaaattcatcttgtgaaaatkatttttcaatcactgtgtattatatttccctgccacatggtcactgaaactctctggaaagtgataatgaccttaagtaaaaccaaaaaggcatggatcactgaaatatagtggcacatactaaagaagagaagctagctgatttttcagtgtgcaaagccttggttcatttcaccaaaggtgaatagcaatgttgtttcagtgttgtgcaatgaaacctgctcatagtgcttttcctgcatttaaaattctgactaggagccaaggtttatctttaaacacccatgcttgaacaagttcagacaaaatgttcctaattgtaacttgctctgctttcatttttatctagtagatttcctttatgagggacagactaagctatggayattcagacacaggacataaaaatacccatgatgatagtacttcaaggcatcaagtgtttattttatatgcagttgttaaaattatagatttttgaatcagtcacttggatttgactaagtagtcttataaatcattagctgcatgacttggaactctgttcccttctctataacacagcaacactgaaaacatctgttacatatatttgctgtggagattaaaagaaataaggtactagcactgtgcctgacctattcagcaaatattagctattattattgatactatggatcttctatgtgccatgtactgtaccaaactcctttcataatattattacatggtcataaaagatctgcagagtaagcataactgtctctattttataaaagagtgagacacagagaagaagccaagaaatgatagcacctggtaagaggctggacaatgattcaaacccaagtctcttgcctccatgctcttttcttcatgcatgacstatctagtgcagtaccagtcacatacatatggctatttatttaaattaattaaaattaaataaagtaaacactttagtgcctctgtttcgccagccagatgtcaaatctcaataaccatgtgtttctagtagctatgatattggacagcacagatatggaatatttccattattgcagaaagccctattggacagtactatagtctgtaccactatcatctctctaggctgctttactctcaataggaaacaatacatttttcttaaaatcttaataaatgctcatatataaattacttaaacagctgtagtaaaggcaacacatttactatagataatcatgtagacaatacctaattccatacaacagtctacataggaatagaaaatacatttttggaccaattaccacagtgccagaaaactagaattttcagctgctatttaggcaaacgttttattcagtgataagaacaaatggtgatgggaaatcgaaaaatcaatatgaaaatgccaagtgagtctttaacatcccatccacttctaatactccatgagcccctgatttctaacaagcttaaagctgttttcaataaatcttttaatgttctggacatggtccacttaggtgtgagctttggaaagaggaaatggtgatttgttattcatgcccttaacactgatgttttggccagtaaatttttcttctcactaaaacccaaatgacctttctagttaggcagtcagtatgtaatttgtataacatttatcatcctcttcctgccaacctttttaattggtatcagatattacaatcagaggactgtaaacacaatgagcaaatgggagtggcaaagcaaacaatcacataatccaatattcaaaacaaagccacatctattgcctctctgagaagaggctcttaccatatgaaatcaatcccgttttcttttggaaatagtttaagtatgagggactgccctggggaacttcacgaacatgaaagagtagctgggcatcaagaaagaacactagacaagggatcggaaaattgaatacctattgggggaaactgcccccaatatttcaacgtaggttctttctattttccataagtgtcagctggctgagaaatagagagacrgtacaaagagaggaactttacagctgggctgctgggggtgacatcgcatatcagtaggaccatgatgccagcctgagtctcagaccagcaagtttttattaagggtttcaaaaagggtgggggtgtaagaacagggagtaggtacaaagatcacatgcttcaaagggcaaaaagcagaactactagtaagggtctaacaaagatcacatgcttctgagggaataggacaaagggcaaaagcagaactactggtaagggtttaacaaagatcacaaggcaaagggcaaaagcagaactactgataagggtctattttcagcggtgcacgtattgtctggataaacatcttaaacaacagaaaacagggtttgagagcagagagccagtctgaccacaaatttaccagggcagagtttttccccacactagtaagcctgagggtacttcaggagaccagggcatatctcagtccttatctcaaacacataaaacagacattcccagagcagccgtttatagacctcccccaggaatgcattcctttcccagggtattaatattaatattccttgctaggaaaagaatttagcgatctcttccctacttgcacgtccatttataggctctctgcaagaagaaaaacatggctctttttgcccaaccccgcaggcagtcagaccttatggttgtcttctgttttacaatcaatttatacagttaacacaattatcacagtggccctgaggtgatgtatatcctcagcttatgaagatagcaggattaagagattaaagtaaaggcaggcataagaaattataaaagtattatttgggaactgataaatgtccatgaaatcttcacaatttatgttcctctgccgcagcttcagccagtccctccattcagggtccctgacttcctgcaacagacaacttcttggtatcctgaacatatctcaactatagcagtgattatattttgttttaattgccaccttccatgtcaaattctcctatagactgtgaactcttcaaaacctactgcatatcaccatgccttgtgacatgataaaatattagccttattgaaaagataaaccaacaaatgactattgattgggtagctcatataatcaagaaataccaataaactgtatcaaaccatccttcctccctcccccaaaatgtataatcatcctgaaaccttcatgcctcattgtctgttattgatttaaccaacttgctctggtctaataaaacatggcccatgtgctgacctgtttctctttgccaaagtgacttggttaatattaaattctaaggttttctcaaatatcagaagcacttgaaaagcaatgcttaaagaactggaaagactgtagttctttcagttctggttactcctcacagagagaaaagagttaaaattagggattcagaaccagtggcwggatatcacctcaactttcagagatgatacagtaagtcaccgaggcctgtggaatgtgttcagtactaacgaatattagcatagtaaaaaataattaatgcagctctagggaggcctaatttacacttagcaattttcgtcctggaaattctggctcattatgcaaactgctgtgcttaataacccagaaactttgacaatatatgcatttatagcctaattaggctttcatacatacacacacctactaacctatgccaatgtccttatgcaactagctggtggaagagcaagaagtggctccgtgcacctgcatgtatctttttactactaaagccactatctgacgcctacaaaaattcctatttctgcagaaacagctatgctgacatcaaagaagcaatggtttccagtccacaactactacaagaggcaccattcttcattcttaaacagggggctttattttgtttctataaaatgacacattccccagctagaaaagaagagcattgctcacaatgatattgagatcgcaagttctcattctgtcactttttaggaaggcttaccttcctagggcaattttcttaccaaggaaggaagaaatcaaacggatcagctagagtcaggcttttcctgaattcagttggtaatatctgttttagtttccttggcaaatttgcatttcctctgtgttccacttcctttgggagagccyggtttgcaagccaattattttttacatttttctttctgttttctcaattaagcatttttatgagcatttaatcatgaagaatgagagagctaacggaaagcatttgaccttatctgtgtggcgctcccactaaaaggtctatgcattccaggaatataccttcatcttttcttgctgaccccaaaggatcacttgatcccagaggttgcttcttaacaggtgaaataagaggaaagaagagctgtacctaccatatcaaagctctcctcaacccccagctcccaagagtagacatatgctgttctaatctaccattttgattttatcatctatttggagttgagcaatataacttggctgttaacacatacagtatctcagagttatttctaagcagtgtccatgaagagaagccctaagaacatacagatcaagagtcattcatcagctaaacaatattcccttaacaaatggggcatattgaatacctgctatgggccagacacagttataagcaggaggcatataacagactggtgtggtgccaaggaagaaaggcctagtgacttgggcatttctaatatgaataacatttaataaagtccattataaatcaacaatcaactttaatgaactagccccttctctgaggttatcrtcttatgtaaaaagaatgtaatcccatctgatttcttcattttatcaattcacagaatgccaatactggggctcagagctccagctacccactttggattttgaagatgttttaagatatgatgaacaygcatacaagtggctctccaccctcaagaaagtaggcatagtaagactcaccggagcatctgacaaaccaggagaagtttcaaaacttgggaaaaggatgggtttcctctatctcacattttatgggtgagtcaccaaatggtttgtattctgccatcacagataaggtttgaaatagttcccaactgaggacgaccgccttgattgaagatacagaaattctcataatgtcttgagtaggaagtcagataaaaagaagagtctaaaagtagtattttgctgagaatgataattttttaagagaccaaaagcccaaagacaccaggcaccaaagacatcaggctagttataggtggtgtatataatctgcttgggctgccataacgaaatatcacagatcagataacttaaacagcagaaaattatttatttgtttttttacagttctggaaactggaagtctaagatcaaggttctggcagggttggtttctgatgaggcttatgtcttgtggcatgcagatgactgccttctcactgtgtcctcgcatagcctttcttctgtgcatagcacactcctgctgtctcttcttcttctgatatggacaccagtcctattagcttagggcccagggctcmatctccaagcattgggggttagggcttcaacatatgaatttggggggacataatttattccgtaacaggtgagatgaaagactgtgtttctccaagactttacaacatattaaactttatgttaaagttcattaaacttttacctcccaagagttggctgaaaataaagttgggccctgagaaattaaaatcagtcacagacatgtttaaaagataaaactaacattcataaaattaggcctatgtggtttagtaagtaacagggagatataattgattttaactttggaacaagaggctgtttgcataagaatttcctgggaggtaacattaattatggrtggttaaacactaacaacaggaaacacttatgtagatgtgggagtataactgtatttctttagagtgagtcccttatgtgggattaatgcaattattcttgggctcatagagtagagagcattgaaagtgaaagggaccttccaactccaaaggttacaactggaagcacacgagctgtattcagatgtttggtttggcccacatgatgttgaaagaaaatggaattagtcgttaccacttgaaaactgggagattttacattacatgtggacctgacttttcttgaaaaatcatatctagcaacaacagagcctaaatccttgcatgccaacaatctactggatacaagtagaggctgcccttgaagagaggtagactcactctccagtttgccagaatcctccacgctctccagacctgcaagggccctgctactctttacgtttgccacccctaaactagagtaagacttggtctgtagataaacaggagaccaaaaatattcaatcactgaaagactctgccatctctgccatgtttagacttagacaacacagcacctactctgactccgaaacttacatttaccattagtggatttgtgttgtataaaatttgtatctcccttacacctgcaagaatttgagctgccctagagattacagcaacaacaacagacaaaggaaagagggggaaaagtctcaaaattattaagagccttaactgtattatgtattgttcatttaattstcacaacaactttctgaaataaatattatccttcagttcactgataaggaaactgaagcgcagagaattaatctgtaacccaagtgcccacagatagtaataaaggaaccagagtctgtcctatctatggactttctgctctaccttgctgtcaataatatgaagaaagcacatggaaaagaagagcttttagccactggtgttaaacaggacactttgaaacaaatctcttctaagtcrttttacttagtttttatttgctgacaacaaactttttgtatctgttccaaggcatttcacaatttcataagagtggccaaatktggggatctttgttggagttctctaaactaccctgcaaamccatcacactaggggtcacaatctaagcttgatttattacgtgtgttgttttgtttttgcaggtcctataaaagggcttaataatttggccactgatctaatattgtgaaattattggaataaatactaaaggtctgttgtcaaaacaaatcagaactcctactaccattccatgtcccttatgggccttgccacctaaccagataagttaacctacccatctcaccttccttagattatcacatttcttacctgaatctctcaaattatgtgcatgccagaaaacgcctttctttccagcttaccccttacttctaccactggttatcaagatctctctacatattttttgacaatttttaattctctacctcaagaactgacagaacagttttgttgtttttgttattgttgttttatttgcttttttgtttttgttgatattcagagaayaagaaaaataaatattttctctaacattgtcccctttttccatttctctgcatagtaatgtgcaaaagtgatactgaagtctgggtaacgtagatttaaaagaagaaagaatacttagaacagtggttttcaacctaagctgcttattggaatagccaatttaaaaaatactgacatctgcatcccatctccagagcttgtttttctttttttatttttttaacagtactggtatttggcctgagtatcaggactcttcaaaactctgcaggtgattctcatgtgcagccaaggttgagaacctctggctgaaaggaaaggggacttcaatagaagtcaggtctccattgggatagaactggggtgctttatatcatctgaactctcacaatgatgtgcacaaaatggcatttaccacgttattctttctactttgtttgtgcctggatatgacatcttcagaacagactcagtagctgccttaaacaatgtccctccctttcatatctttgtttctccactggaaaagtatcttactcttgtttcaaaaataattagttggtgagtgagtgaatggaatgaataaatgcacacaataaataatggagaaaagagattaaacaatagaagaggggtagaaaaaggaaagtaggaacagattaaaagtaaactttgctctccatgcagatttttcaaggaagcttatgactgctcttggttagatgcctaaaacaataatagcttgctgatggtgccacgttagacatgccttccttgggaaactagtacccacctcgcactttgccattcaagtagggttattagtttcaaaaatgttaaatgcatgagtctaaaatgagaatgagaatagctatttttggttcttggctgtcatctcagttgttaggtggttggttggatgaacaaaaaaacagtagattccagcatttcatgtagtcttcatatacagaaggcaaggaataaatgtttaatgaataaatcatgcctaaatctttgtaaaggactataaaccagcagataaatacaataattattagaatctttcaccattataaactatgttcaactaaatcaaaatggcaataactttcaggacaaaagtgcatgtcattttccacatctgtattttctcagatgcttgtcattattttgtcagcacatcatcatctagacaatatttttttatgcaaccatgtgaaatgctcagtaactttactcacttgataatgatgaatactttcctaggacaaaagaataagagtaggtaaagaaattctcattgtcaattttgtcaaatacatgtaaacatggagcagtatgtaaaaagacaacctttcgagaatttaaagctttgatttagcacaaagtttttacagactaggccaaaatgcctcatctcatgtcctttctcccccaccaaaaaaaagaaaatcaatgaaaataattttctggagcccttttaggaaaggtgatattattgaataaatgaattttatgacatgacttaatccattgggaaacagttattgtaaactacattctatcatacactgtcattttcaatgattataccaagttaggatgttttttcagaatgtatcctacgaagtaaatcccaaagaaagtacaatttctgtcaatcaaacagagtatctttcttgaatactaataatacgtgcatggcactgtaccaggcattttgttgggtttagatttgggtttctactttatgaaaaartaccttttgtaattgctgtatgtgggtaaatgtaaatacttgaattggcttcctttaaataatctaggccaataaaaattccataaagcgaaggaacagactgaaaagtaaccccggacttttggcattccaactgagggaacatgacagtcaatatatgccaacagcagttcaaagagggtggataacaggaaggtgatccccaggatgatgcaaagcatggtcaagatggggaaatactcatctaccaatattatcttcagacaaaatgaatccactcctcaaaatttacacaggctaccgttgtgtaaataggtgtggcaaaataatataaatttaattaagattatgcaatgtcgtgcagcccttcctccccatcctcaagctaatccaactcagacacatgccatttctatgacatgccattcttccctattcctggccatcccctaaatcagtccctttctcacttgtttgttcaggaccgcttctttctcttcctgcttaaccttttgtttgctgcatgtatctctcttgcttttatatctcctggacctttattctgactacagacaacctgtgccaagtcttcatgtctttttggctgctttttggcctttcttgcccttttcacttgacttactaacatttttcctcttcccttccaaccaccacacctgctacatcctcccattgatctggcatcctctgcagcgctacagtagaaattctctcccagcctctgttctgtgaaaccactaccagtacctcatccccaagccctggcattataataaaccaaaataattatatgctcctcactcaaatgaacgagttttgcactcttgatggcccatcaggaaagagaagtggaaattctctcccacaaactcttaacataaagtaaggcaatttctactttttgttgcagattctatttttagtagtaatacatgcattatattaataaaacaaaatgaacaacactygtgtaagatgtcactactgttttttatgctggactgtagcaatgcatggctttatcatactataattctggtaagataatattgagaaattcagacaatcttctctaaaatggcaaaactcaaaccctgaaaattccttttttaatgagttggacaactaaataaactggagagtccagggaattattatttacataagctgatctgtgagtatgtttgtgttcatgacacagagaaagggagagaaagaaagacttggtgggaagggtacagtgtcattttaaaaaatatttgtcaactatattttatattattaattaactatcctgcttgtaactctaccagtctaacctttgaaaactaagaaggcttatatcattgccattgccactgtcatgttgagcttcttataggcataaatggtggcgtaatcaaggtcgtatctttactgttaactcagcacctgacacacaattacgtctcaggaaattttaatgaaagggaatatgtgctaagtaagatattgtagacttccatctgaacaagacaacaaaagctctttgacaacattgtcaaaatttatcagtccataatttaaaagttaacctcatgggaaactcagagtgactcttcttccccaaaaagtcaagcagaagagaataaaacttctaaccttagctagcgagacatccttcttttcagaactgagcccagcagttcagatttgttttttttctaagaatgttttatttgctggcaccaacaagttgcattaatacatgtaatgagggttacactggtaagaataatggggtaaaactggaaacaaaaatctgaaatatgaaattcaacttcagggaatgaaataaagaaggcaagaggcaataggaaaaggagataaaataaatgtggatcttggtggtagtcaacttttatcttgtatagcactgcatggaagctatataactgttgaataaaacttataaggccacaagtttatagtagaaaatataaataaatactttggaaactttacgcccaaaacgtttaggaagaattggggacccagtgccccccagcatctgtactggattacgtccttgasagctgctcataggatcaacagggaagcagtctaatcatggcttcaccatgggctgtttgtaagcgagaagtcgatctgagcttttcatgtgatttcccagatctctctgatcctcctctactgcggacttgcctcactctttctgcaggggtgttttaatacctgctatgtcctttgaggtccttgggtgaaagtttgcttgaaaaatgtagaatgctactactactgcccagtgttatatcttcatgagttccttgcaggcaggcttcattggataaataaaataaggtcaaatagaaatgtgtctagtgagttgttgatctaatccaccagccagaccagttaaggattcacaacactgaaatggcctctgggaagtacaactataatatatagctttccagtatccactagactcctgtttgcatttctgaaagttgtcttgtaagccagcccagcagcatttcacacattagattggattcaaggatgtacaagtgaaaaatattactatttctcggcatctcacccctaagaaattgctcctaccatgaatacagcctccaaatctgactttgaaacagctacttgtttgaaatacttgttaccagaaaacagttgtgaagtatggggattagagaaagaaaaaacaagtttacccatttgttgatgtttctaattaggaaattgcttgagaaaaccacccagcccttcttgaataaaaatgtcttctgggttatgaaaaatcaacctagaaataattcaaacttgagaagaagacaaagaaaaattgcctgagttctaaatttaattgtaatcccattctactttttaaaaatttacactgggactccttaataacttaatgtgctaattataatgcttgggtagagggacaaaaaaactctttaaaatgtgtattctagtaagtattagggtttcttgagcagagtaacaagctatgttctttgagccattgtgaacctcagcttatgttatcagccaagagccagtctccagggttccctttgtaatattaagtttcatagtaattaatactgctgccaacaaaaccacttgagtatgaagtcatctcatgaatgaaaggaaaaataatttctgtgtctcatgctcttttagaaatcacttgaggaaatgtatgagataaccaattaaggcaattgcttttcaacaggtcctctgacaccccaccccacccccagcacacacacatacaaccttccttccttgcttgtactctgtgcagccaggacaggtggctgttattgggatggtagaaataattttttattaagccccttttatgtactaagtattgagctcagcagtttacactcattattttgaatcttcacaattctgagaagaatcattaacccattatcccccaaaaaaatgaggcagaagaatcaggctacaaacccaggtttgcttgactcaacagcctgcagtctttcctttataccatgctactatggtggttcattgttatctaacatttacctcctaatttccaatgccataataactgttaattgctcagatgcaaggagataattagacagcattatatagaaatttatcaaattaagtagaatgacagcaccagaatattcattgctttctcctaagttaaaattatcaccaaccatttacataaagggaaaatggcaattaatacagaatcagaaaacattttattcaatatttcacattaaaaaatcaaaactaatacccaattcttgttctaataaaatgcattaagcaaaatttgactgcctccaactcaaaaagaaccctactaaatatatttaatgtggaattctcattaattatttcacatttttgcaatgtactacattatttgttttttataatgaagcctttggggcttcctttggagcaaattgctataactttttctttatgtttttacaggtagttttcatccttctatcactacctgacttcatttttattaatggcagtattattaacctttaaaaataaatgtacaacaaagatttctttttttattttatttttaaattatttttgcagttttattgaggtacaagagacaaaaaytgtatatatttacagtgtacaacatgacattttgattgccacaatcaagcttattaacatatccattctttcacatagttatctttatattttgtggcaaaaagacctgacatctactttgttaggaaatttcaagtatatgatacattattatcaactattgtcaccatgctgttctttaggtctccagtacttattcatataataaccaaatgtttctaccattttgacaagtatctccccttttctcctactcccatcccttgtaaccactgttctattctctgttactaagaatggacttcagacaaccaaaatgaatacatacgttgacataagcttggtgctgagcagtaaatttatgtttatgtcaattaaattgtaggggaggaaaaaaaggatattgaacagctaaaaaatagaaaaagcaaagtacagtgctaaggatgcatgtggttgataatactctaaaccaggaaagaaaggaagtgaataccataaaatttaggaaagctgttacatttggggagaaaagtgaggtttgtgtttgttaaaataggtttcctgtggtaaaatataatacagatacagaaagtcgcataaaataaatgtatagcttaatgaactatcataaggcaaacacccttaaacaccagccaggtcaaaaaatggaacgttgccagccaccccaaaacccattgacatatcccaaccaagcataaaccttgcctttttccccaagtgtaatggctttcctaagttttatggtgttcacttcctttctttcctggtttagagtattatcatcaacaagcatccttactactgcagtttgattcttctacttttcagtttttcaatatctttttttcctcccctacaatttaactcacgtaaacataaatttactgctcagcaccaaacttagctcaatgtatctattcattttggttttctgaagtccattctctcgtaaattcctaaggaaggcctcataggaacagtattctctgaattcttgcatgttgacagcagttttaaggcctttatacttgaaaattggcttgaytaaatataaattattgggtcacagcatctttaatatgtcacttatagttttactggcaatatgattttcttttccttaaaaataatttgatggccaggcatggtggctcacgcctgtaatcccagcactttgggaggctgaggcaggtggatcacgaggtcaggagtttgagactagcctggccaacatagtgaaaacctgtctctactaaaaatacaaaaaaatagctgagcctgatggtgggtgcctataattccagctacttgggaggccgaggcaggagaatctcttgaacccacgaggcggaggttgcagtgatcatgccactgcactccagcccgggcaacagtgtgagactccatctcaacaaaaaaaagtaatttgatgtttttacctggattttgaatttgtgttgttgttgtttaaagtctagtaatttcatagactatgtcttgatattgattgttctgggacagatttttctgggaggatatgatttgttttagggaacagctttaaatttttttcagaaaatgtttctggaatcatattttttagtatctattctgttcctttgctttgggcttcttcttttgaggactcctgttaagtatatcttaagtcttctttgccggtcctcttgttactttctctcaaatcgtttctattgatttcttttaaattcttctccctcttatctcctagttacgtttatttgatcttgcattccttctaatttattctttgtttaaggagtttttaaatttttttcttttcttaatacatcagtccatttttgagtttctaattctgatgtaggttattcttttacatattggaccattttgatgaagacttttggattcattagaagtggttataaaaaaaaacagaaggtagaaaaaataatattttatcttttttattgggggtggcctgtctttctgacatgtactgcctgtctgtaggtatgctatttttctacttatcctgggtttttctcttaaaataattttgagtttaaaccttgattttgttgttgttgtttttgttgttgttgttgctaattttacgttaaacttgttttccttaactattaaaaggagacatgattcagaaacctttttaaattcatggttttaagctatgtttcaaaactggctaacarctttctaagaccttctagttcgtctccttcactttatcaggaccttgtttttttctttgtctacatttttcctatactactcaatatgcactcttctcagaaggaaggtcatggaagggagatttatctggtttgtttctagaattcatgaattccagactattcagatcccttatcatggaccttatgtactcagctatattggaatgtagaaatcccctccgaagtttaaccgccattctcacattgccccactgcactgtccagtaaacacctgttagtgatttgggaatgttttagatccatcatgtacccagttgcttctctctgctttctcctacacagttgccaatatcatataggtcttctggctttgaaaggtttgtctctatcccctcctatttcctggttcatgggaatatcttatcactgaatttttgtttagatgttgtcattgaattcttgaattttcactctagatgttgtatagggagaattcagagagattcttttaaataatttcaccactatcatttaaacctctctctttactttatatctttaggtcttgtggagattttcgtattagtttaatggattgagtaagagctattctagatatcggaaaggttatcttcgtttctctagtttgtgtttggggtactaattttcaccttaaaaaaatggcatgagaacaaaaggcagcagaaacttctgcagacttaaatgtccctgtctgacagctttgaagagagtagtggttctcccagcatggagtttgagatctgagaacggacagactgcctcctcaagtgggtccctgacccctgagtagcctaactgggagacaccgcccattaggggcagactgacacctcacacagcccggtacccctctgagacaaagcttccagaggaagaatcaggcagcaacatttgctgttcagcaatattcactgttctgcagcctctgctgctgatacctaggaaaacagggtctggagtggacctccagcaaactccaacagacctgcagctgagagtcctgactgttagaaggaaaactaacaaacagaaaagacatccacaccaaaaccccatctgtacgtcaccatcatcaaagaccaaaggtagatcaaaccacaaagatgaggagaaaacagagcagaaaagctgaaaattctaaaaatcagagcacctcttcccctccaaaggaacacagctcctcaccagcaacggaacaaagctggatggagaatgactgatgaattgagagaagatggcttcagacgatcaaacttctccgagctaaataaaggaggaagttcgaacccatcgcaaagaagctaaaaaccttgaaaaaagattagacaaatggctaactagaataaccactgtagggaaatccttaaatgacctgatggagctgaaaaccatggcacgagaactacgtgacgaatgcacaagcttcagttgcaaattcgatcaactggaagaaagggtatcagtaattgaagatcaaataaatgaaatgaagtgagaagagaagtttagagaaaaaagagtaaaaagaaactatcaaagcctccaagaagtatgggactatgtgaaaagaccaaatctacttctgattggggtacctgaaagtgacggggagaatggaaacaagttggaaaacactgcaggatatcatccaggagaacttccccaatctagcaaggcaggccaacattcaaattcaggaaatatagagaacaccacaaagatactcctcgagaacagcagctccaagacacataactgtcagattcaccaaagttgaaatgaaggaaaaaatgttaagggtagccagagagaaaggtcgggttacccacaaagggaagcccatcagactaagagtgggtctctcggcagaaactctacaagccagaagagagtgggggcaaatattcaacattcttaaagaaaagaattttcaacccagaatttcatatctagccaaactaagcttcataagtgaaggagaaataaaataatttacagacaagcaaatgctgagagattttgtcaccaccaggcctgccctaaaagagctcctgaaggaagcactaaacatggaaaggaacaaccggtaccagccactgcaaaaacatgcacaattgtaaagaccatcgatgttaggaagaaactgcatcaactaacaagcaaaataaccagctaacatcataatgacaggatcaaattcacacataacaatactaaccttaaatgtaaatgggctaaatgctccaattaaaaggcacagactggcaaattggataaagagtcaagatccatcagcatgctgtattcaggagacccatctcatgtgcagagacacaaataggctcaaaataaagggatggaggaagatctaccagcaaatggaaaacaaaaaaaaggtaggggttgcaatcctagtctctgataaaacagactttaaaacagcaaagatcaaaagagacaaagaagcccattacataatggtaaagggatcaattgaacaagaactaactatcctaaatatatatgtacccaatacaggagcacccagattcataaagcaagtccttagagacctacaaagagacttagtctcccacacaataataatgggagactttaacaccccactgtcaacattagacagatcaatgagacagaaagttaacaaggatatccaggaattgaactcagctctgcaccaaggggacctaatagacatctacagaactctccacccccaaatcaacagaatatacattcttctcagcaccacatcgcacttactccaaaattaaccacatggttggaagtaaagcacccctcagcaaatataaaagaacagaaattataacaaactgtctctcagaccacagtacaatcaaactagaattcaggattaagaaactcactcaaaaccactcaactacatggaaactgaacaacctgctcctgaatgactactgggtacatagtgaaatgaaggcagaaataaagatgttctttgaaaccaacgagaacaaagacacaacatactagaatctctgtgacacatttaaagcagtgtgtagagggaaatttatagcactaaatgcccacaagagaaagcaggaaagatctaaaattgacaccctaacatcacaattaaaagaactagagaaccaagagcaaacacattcaaaagctagcagaaggcaagaagtaactaagatcagagcagaactgaaagagatagagacacaaaaaacccgttcaaaaaatcaatgaatccaggagctggtttttttaaaagattaacaaaattgatagactgctagcaagactaataaagaagaaatgttgagaatgacacaaatggctcagtggaaatacttatatttgtttaaaacagcatctatgataaaagcaggataatttgcagagtttcagacactcaccccagcacaacagtaaacaagtctataccattggattaagatattatgttgagcttgcctcttcagttttaaaataatctggtcccatacctctacttcagtcacagccattctcagtaatctgcttgagttgttgccttacttggaatagcattagaatctgtctctaatgaggggtgcatgtaagtacaccttcatctcaccaaggcctcaccactaggcttttaaaaaagttccttcatgaccaatgaatcacatttgcacctgtttctcccatccaagtactaaccaggcctaatcctgcttagctgcaagatcaggcaagtccagggttatatggctgcaaatatgtttgcattttatttctgctgtgttttcttggagagttggatttgggatgcataagtaagaacttagtgtcctcaacaataagtagcagctttcttggcatgattcatttctatgacaaggtagaaaggtaaagcagatgacatttctaagatttttccagacttgtgctatgaccattaggagaatgttttatgattggaattggtgagctcctttcatgggatttatcataatatgtgaagatagacttttaggctacacatcccatactgtgcctaagacactctagggctaataaatgttttattattccctgccagttagctcagagggccagagaactgctctgatgaagccaagtcacagacccccatccctgtagaggccagtgaatgtcaaagaaaagatctgttctctggctaatgcttacaccttgcatctcaaccagtttttggctagagtaaaattctgtcagtttacccttgatcatagaaagaaccaggaaaaagaatgtaggtgaatcaatgcaaaaccatcaccactcttgaaaaataattcaaatagtcatttcctattgatcgtgcaaaccgcagcattttcttagaagatattatgcattctgcaccttgatgaaattacttttttgatctccttaaatctcttctcatatgttgattatttttcaaatgccagtgttgacaatcgtctggatccatattttgtatggtctatggagtgacatgaacttcatagagaacatgtatttcttggcaactctcactgcaatataatggattgtctgacacatatttgaaatgagttgcagcagactataatactccatcttttttcactcagcctgtttccacatcatggccacatatggatggctgcttgacccttagtgaaagatatatcaagtgttccaccctaattttaaatgagaaaaatagagcaaaatagccaattttatcctcaatcccagggaacaggtgagaaactctttttctcattaagaaaaatatccccacatgtgagaagagattatagattgtatttccactctcctcctgccactgccaccctactaataccctttaccgtataccgtatgaaaatgaaagctcataaaagtcaccccttccctgtttacactcattcagtcaaaatttattggttccctgctttagaattggcactggtttcgttgatggtaggagatcaaaagtatttgttgtactctaagagagtttacagtccagaagaggaagcggaattctgtatttgtgtatttaaatgagcttagacttacaatagctctttaaaaattataaccatcttcataaaacacctaacatattcaaatctaataaatgagatgaataaaacatgcttatgagagttctgactgtaggagtaaatattgggtaatcaggagaatgagaggaaggaaaagtcctatggggcatctcctgtgtgtcagacatagacctttcttatttgttacaagtttttgaaatacattattgttctattttccaaatatataaattgaggcttagaaataatagacagattgtccaagattatatagttatgaattagaaaccaaggctttgaagccagtaccgtttgaacctaaagaccaagactttttctagatttgagattatgaaatagttggaacctgagctagattttcattaatgggtacagagatggggaaaagaacagaaaaaactgacagaaaaaagaaaccagaaaaaaaggcaggaaagtgtgtagtgctaaaattaacatgattagaataaatgactcaaatatggcaatagttggcaaggttagaaaattgcattgggtctttgaattctagatcagcagcgctgaattctatccttctgggactgaagaatcagtaagagcttctgacagagaaatggcaaaatgaacatgaaacactagggaggttttcctggttgtagtacatagtgtatgggggaataccagaggcagggtagaataccagactagagtgactttctaggaagctaaaatatccagaccaagggtcttattttgtgtgctcatttgtccatatgtgaatggagattttataaaaagcacttatttaaaagttttttaaattaggtgaagcaaacttcttcctccaccagataataaatttttatatagtgaatcttaataaataggacctcccccacctggtttctgaacctgaaaaccttggcatcattctggactccatttctctcatatcctacatccaatttatcagagaatcctgataactctacctttcaagttcaaatccaatcattctctcctatgcatgtagccatagttaggagagaaccatcatgattctcatgtttaggagagaattggttaccatcatctctccctcctcctacctttttcccagtaccatctaccccttactcagtggctagagcaattctttgaaactacaattccaatgaataatttacataatggaaaacttcagtggcttcccatcacatgtaaagcaaaatctcaaatcttcatcctagtccccaaagcccttcagaaactggcttctgtctgtgcatctgatgcatttcccactcttgatcccctggtggctctgtcccaaccatgctgaccttgttctgcccttgttcttccacaaatacactaaacatactccgaactcaaaaccttttcactttgggttctgcctaaaatacatctcccagaaattcacatttctccttcccttattttgtttgggtttctgtggggaaaatgccacctattcatagagcacttcccacagcatcatctctgtaataatacttctctgaccccattccttatctctttaccttgcttcattttctttgtagaacctatctctattaaatttaataattactattttgtctttttgttccctgctgtatctctgatgctaaatcaatgactgaaataggtgttcagtgtttatttattcaaagataatttgatgtatatgaatatatattaatagacattataacagcaatcaaatggcatgtatatatagtgaacatttttcaagccatatttggtttatttttaaacatggcctcctttcaattacccattgtctggatcttccaagggtartagcttacaaagtctgaataatggtttattttcttgctacagagttgcaagtaaccttagttctttttttaattcacttttttttaacttttaagctaaggtatttttaatttaggtaaaatttacataacaataaaattaatcattttgtggtacatagacaccatggaatactacacaaccatataaaagaacaaaatcacagcctttgcagcaacatggatgcagctggaggccattattgtcagcaaattaatacctgaacagaaaaccaaatactacatgttctcacaagtgggagctaaacattgggtactcatggacataaagatggcaaaaatagacactaggaactactagagtggggaaggagggaacgggaaagggctgaaaaattacccattgggtactatgctcagtatctggggatgggatcaatcttaccccaaacctcaggatcatgcaatatatccatctaacaagtctgcacatgtacccccaaaaattaaaagctgaaattattttttattaccattttaaagtgtaattagttttatttactatattctgttgtgtgtcatttagtacattcacaattttgtgcaaataccacctttatctactatattctgttgtgtgtcatttagtacattcacaattttgtgcaaataccacctttatctagtttaatactttttcataaataatattttctaaactattcaatttggaatgataggaaacaaatttgttatattacaaatggtaaataaagagaaagaatcaaatgtttatctcatcatccctctgtaagctgttatactgagtaatcaaatagtggatgaggggaagtggctccctttaaaagtattctgagtgataaatctttttaaaaagagtatcagtttggtatttcattgtttgaaatccttgacgaattaatggatatagccattgaacatgaacatgtacaaacatcaaaaaagaaagacagccaggcgttatgtgtctggcaatacaagaacataatgccatctgtggctttgccaaagagaaagaatagacactgtctaagcctctgcattttgctgccagtttcccagaaactgcaccatgagtatgtactcaatgaagtccagactgtgggaaactctataggtcaaattccctagttcttcaacaattgtaaggagcacagcttgaaggaaaaacttgaagattaatagacttaaagcatatagcagttgttattaatgagcaagtttaaacacagygtccttggatgaacatttggttgataaaattgtaaagaaaagcaaggaaatgatagctatagaagtcacagtcatagttaytttggagaagacagaagtgtctgtgactgtgacagggcacacgtaggtgcctaaagttttatttattgacctgagcaatagtttcaagagtgtaatttaaaaattgagtttctcagataaatacacaaatggaacagaatagggaccccagaaataatgccacacacctacaaccctctgattttcaacaaagtggacaaaaacaagaaatggggaaaggactccttattcaataaatggttctgggataactggatagccataagaagaagattgaaatgggataccttccttaaaccacatacaaaattcaactcaagatgaattaaagacttaaaygtaaaacctaaaactatacaaactttggaatataacctaggaaataccattctagacataggacctggcaatgatttcatgatgactataacaaaaacaattgcaacaaaaacaaaaattgacaaataggacctaattcaactaaagagcttctacacagcaaaagaaactaacaacaaagtgaacagacaacatatagaatggaataaaatatttgcaaagtatrtatctgaccaaagtctaatatccagaatctataaggaacwtaaatttacaagcaaaaaacaaacaaccccattaataagtgggcaaaaaacatgaacagacacttttcaaaagaagacgtatacacagccaacaagcatatgaaaaagtgcttaacaccactaatcattagaaaaatgcaaatcaaaaccacaatgaaatactatctcataccagtcagaatggctattataaaaagttaaaaaataacagatgctggtgaggttgtggagacaagggagcacttatacactgctggtgggaatgtaaatcagtccagccattgtggaaagcagtttggcaatttctcaaagaccttaaaaacattatcatttgacccagcaatgccactattgagtgtatacccaaaggaatataaattgttctactataaagaacatgtatgcacgcatatgttcatcacaacactattctcaatagcaaagacatagaatcaacctaaatgtccatcagtgatataatgaataaagaaaatatggtacatatacaccatggaatactatacagctatatgaaacaacaagattatgtcctttgtagcaccatggatggagccagatgccattatcctaagcaaactaacacaggaacagaaaacccaatacagcatgttttcacttacaagtgagagctaaacattgagtacacatgggcacaaagaagggaacactagacacctgggcctttgtgagggtggaggttgggaagacggtgaggatcaagaaaatcacctactggctactatatatattacctgagtgacaaaaatactctgtacataaacccctgtgacatgcaatttacctatataacaaacttgcacatgtacccctgaacctaaaagtaaaaaaaaaaaaaatcaagtttctccctaagagcagaaacaagacaaaaatgctagctttcaccattgagattcaacatcgcaccaatatttccagccagagcgattagacaatagaaataaaggcatccaagtgagaaataaaaaagtaaatctatctctattcacagatggtatgatcttacatataataaatcccataaaatccacccaaaaaaagctactaaagctaatgaatgaatttagcaagttgcagggtgcaagatcaaacacaaaaattggttgtctttataaacagtagcaatgaacaatctgaaaaggaaatcaacagatccatttacaacagcatccagaagaataaaatacttaggaataaatttaatcacaggggtaaaagacttttatagtactttatactataaaacattgctgacagaagttaaagaaaacctaaagaaatagaatggcatcctgtattcgtggattggaaggcataaaattgttaagatgtcaatactccccaaagcagtctacaatccctaccaatatttcagtatcattttcttgttttagaaatggaaaagccagtatcaaatttatatgaaattgtgakggcctccaagtgggcaaaacaatatttaaaaagaagactgaaattaaaagactcatacttcctgattttgaaatttaactacgaatctacagtaatctaagtagtgtgatattggcataaggatagacaaatagatcaatggaatagaattttgagagtccagaaataaacccacacatctatggccaatcaattatcaacaagcatgccaatatcattcaatagagaaagaacaacctctttaacaaattgttctgaggcaactgaatacccccatgcaaagaattaaattggacccacaactcatatcatatgcaaaaattaattcaaaatgaacaaattatctaaatataagagttaaagccataaaactcttagaagaaaacatagaggtaaatcttcatggctttggattgggcagtggattcttagatataacattaaaagcatgagcttactatataattccatttatggtaaatatctaaaataggtaaatccacagagacagaaagcaaattagtgattgccaaggtcttggagaagggtagaatggaaagaaactgcttactaaaataagaggttttgatctggagtaatataaacgttttgaaactagctatgyagaggtggtggttgccaacagtgcgaatttactaaatgccactgaattgttcactttaaagtgattcattttctgttatgtgaacttcacctcaataaatcactttttaaaatgcattaacccagtaaaaagataacctacaattccatatatacttctttataaactgtaggatagactgatgtactcttttgttgagaggagaggaaaaatgaggagatgttaattctgaaatagtgactttaggcagagaaaggtcagattccttgtctcactcatagtcattatggtaattatttcaaaaaatgaaaagtttccatttctccccacatatcaaattcattctaatgcatttcctctggcttagtgacaacctgtttaaacatgtgtttcttgcattttacagacatacttggcaagtgcaagacaaaatcgatgcaaacaatgtggcttacacaactgggaagctaagctttcacactgattatccagccctccatcatccacctggggtaagtgagcttcaacatattttccacaaagcatgatgatgaccagtatcttttcgtattttgagtctagaagattacacatttcaccargtagtttgtcttttataaattttttctccaaacacaatccaagctcacaaaatctctgtacctaaatcctaaatatcttcacattcctaaaggagaggataatttcattcatttaaaacaacaacaacaacaacaaaaacatttctttgttcttcctagaaattactattagcattttttgctttgccaaracagattttaaggtaggagtaaatcttaaggtctttttgcacatatatttctargaaagttaagagagaaaatgaaatcagtaaacaaaatgtagggtttccctcaaagtcacatgggcatcattcatatccattaactactgctgcattaaaactcattctactataaagacacatgcacatgtatgtttactgcagcactgttcacaatagcaaagatttggaaccaatccaaatgcccatcaatgacagactggataaagaaaacgtggcagatatacgccatagaatactatgcagccataagaaaggatgagttcatgtcttttgcagggacatggatgaagatggaaaccatcattctcagcaaactaacacaggaacagaaaatcaaacaccgcatgttctcgccyataagtgggagttgaacaatgagaacacatggacacagagagaggaacatcacacactggggcctgttgggggggttgggaggataggggagggatagcattagaagaaatacctgatgtagatcacgggttgatagatgcagcaaaccaccatggcacgtgtatatatatgtaacaaacctgcacattctgcacatgtatcccagaacttaaagtataacaaaaaaaaaaataataactcactccctaacttgatggcttaagaaaacatccatttacttagcccttgttttttcaatatgggctgtattcagctaggcagctcctgtcttcagtcatatacctgcaattggttgctaagttggcttgggacagattgactttcactgagatggctggtttctgctccactcggtctattcaccaccagtaggctagcccaagtttaatgcatatggcaactagaagaattttcagacagctacacaacttctcaaggcctgggctagtcacctctgcaatgttatattggtctaaggaagtaataaatctagcccacattcaggaggtgaggaaatagaccgcttatggaggaagctgcaaaaatgcattataaactgtgtgactacaaggaacataataacagtggctatttttggaaaccatccaacatcccatctatcagattccttgtcaaggagggaaatgctcagtgtgaagccacaaatccccaggagaatctctgggtggacattctttctctacatttttacaaaagtttcattttactaaatgagctacatttttacaaaatcatcattttattacaccaaaaataagtggttaggaaactaccttttaaaagatatgccatccctatttttacagctaaattagactatgtgaaataaccacatagaaacctatatcttcaaaggcaaatgaaaatttgggcaattcttaagttaacaaaggagaatgggccaaaatcacaattagcccaatttttttttcattatcttcactgtacatgttttctctgtgcccttattgttacccattcttcttgccagtattagctacgctagtctagtatttaactttacatgttataaattattttgttgattgtaaaataccacatgatttctttgaactaagtggcagtaaaatgacccctgtagacacacttttgggtaagggttgggggcaggagacacccagtgtgattttattctaaatgtggctcagatttttctaaaaccctagagttaagagccaaattaatcagctsagctcttcttccaaacatagcttgagggagttggatggaataaggcttaaagaatgagactagaaaactaaaagttttatttgaatttttaaattatcttctgtcttttaagaatttaagttttgtttctgggttaaaatttgaagcctaaggaaaagtgaccaaatgacttcataaatgttcctgaagtataatagaatgcttgactttttcatagtcatagcacattatactacttcaaagcagttttgctttcattattttatctgactcttcttgacattcctttaaggtagacaagattgatcatgtctttttatgtcagatgagaaaatgaaacacgagattcaatatttttacagggtgacatttgattaaggaggaacttggacttgaacccaggcctccatctagttttctgtcacaccacactgatcctgagctggaatttctaactattataatttatgtagtaaaatagaatatttatagattttatcgtactttacaaacttcttaaagacaagaattgactcttgggaagaaaaaagttctttgtatttcaatactttgtatctcaatatttacacgcacattgcatgtaatagagacatcatagatacactataaagaggcaaagaagtgcaacaaacctgtacctgtctccagcaaatgaaacatccaaactaagtgacttgataggagattttaaaatagcagatgattcctaaaatgtctagattctactagaataataaaatgtaggcaacctgtttgtactgttgttcaaacttccattttgaattattccaggtgagttgtgccaaggtttgagattttctataacaaacagaacaaaccaatatatttttctgtatagatgaaataatctgaaaaatgagttacctgttgagagttcagtttgatcgatttggattatgtggggcagagataaggcaccacatctttaatgaaacagagatgttgcttcactcactgtttttgcagaagtcacatgctgcataaagtaacattcagaaggaaaatatttttggttctgaatgactcatatgaagtaaaattgggttttatacatgacaggcatrtatttgcgttttaacctagcaataaaagtattgtcaggctccatcatcttttttctatttgaagattgtattaaaagtgtaactgtacaaaagaaagtatcaaggggcyttgacatatgtaaataacattaaaaaatgatctttttaaaaattagcacttgaaatattctgtcagttcatgatggcaaaatctaaaaggatttaaagaacactgtgatcctccaaaaacaaagttatgctattgttttgctactctgaccagttccttcctcaaaaaaaaaaaaaaacataatcctatgtaacaccactggcctaatactttgcagctcagttccgactacattactttcatattcaaaagccttcagtgaattccctctatgcacaaatacaaaagcccttcatctgatatttaagactctccatcatgaggcctcaccaattgcccttccaacctgattcactctttctatttatggccctctgctgtagccagactttttattacccagtgaactgtgcatttttgcacatcattatttctgtcacctgatttgctttctygttctattctgcataacccaaatctcatccattcccctttgcctaacttacccgcctcttccccttgaaatccttccctgcctactccaacatcaagtgctccatctatgcagctcttacaagctgttctttttgtttgctaatgagcattatcatgcctgcatctatgtcttcaactgtaacatgtttgaactatacagtattgattataagcaacttttttcttcccaactcttttctgatgacataagaaagacaaaaaaaaaagtttattggctttggttcattcatagctttttgaatctttaacacagtatcaaaaaatggtgcatgtatattattttattttattatttattttattgaagattaattctaataattaaaatgtaatttaatatttatttaataatgcatattttctttttataggttcagcttcttcactgcataaagcaaacagtcacagggggtgattcagaaattgtagatgggtttaatgtgtgccaaaaactaaagaaaaataatcctcaggcattccagattttgtcctctacctttgtggactttacagacattggagtggattactgtgatttttctgtacaatcaaaacataaaattatagagtaagtactatttataaatttcccatagcaataaaagaattgacaacaaaagatccactaatctaaagtttaaacagcacaaaacttcaaygaacttcagagctttatttttattaacatttcacccaattttagagtgatagtattttcaccataaaagtttttattaaattacataaaatttatccctaatcagtattagaggaaaagtaactaagatttcacgtatacttcatttttagaatataagttctacatagctataatcaatgtgattatactarttagaaggcttttggccagaagtgaaagaatataactcaaaataggttgatcccaagagttaaacaatgtcatgtgatattggtctcttttttcttcttagctttgccatcttctatgttagctttatttttcaaagatgatcagcagaagctccaagatttcattttccttacagctagtaatcacaccacaaacaatgcttttacttcccaataaagctagatgactcaatccctaatttctgtccaagtctatccctgaatcaatcatcatggccagtgggttagagaattctgattgtccatgcctggatcacatgttcaactctggagcagggtcagcctcatctgaatcacacggactgagaatgaaacagggaggctccccaaagagatactaagccaacaaagatcatatattacctacacagaacattttgtattctccctttctttttatttaatattattttattataatttttccaagtacctacaaaggccacaaattcatctttttatttgcaaattaacttacattttgtttctacaacagtttatttaattatacctcgattaattttggtaggggggtataattttagaattttagaattgagtttaaatttttctattaagagaaacagccaaatggtatgaaaataaactcatttagaaaataattaaatccccagtacattcatttattcattcaacaaatatttattgaggccagccacttttcttggtacttggaatacatcagtggacaaaacaaagatctctcccctcayatagcttatactctaatgggggaagggaaattttaaagatttttaaacagatgagtaaattataataaaagttaaaaattattaaatgcttaagaaaaaaaggaagagcatagcaagataaggggaatctgtagggcttagcaaggacggaaattgcattattaaagagcgtggtgagggaaagctttactgagatttgagcaaacacttaaacgagtgatggagttttcagaagagaagcagtttcccgaaactgctagaccaaaagttctaaaagggtcctaaggacatgtctggagtgttcaaggaacatcaaggagaccagtgtgactggaacagagtgaaggatgcaagtattaggggaggaagtcaggtagggacaagttcctgtagagtcttgttagcaaattataacagtaacatttactctgagtgaagtaagaagttgctgcaagatcctgatcaaaggaaagactttgatatttatgtaaatttagttatattttaaatgggtcaccctgactgctagaaagagcaaggatagtagcgggaagaccagctaggaagctactgcatgactccaggctagcaatggtggtgccttgaacatgagtggctagagtgacagcagtggtggtgtggagaaggatcagtttttggttacattttgcatgtataaacagattgttttcgtgaaagattggaggaagtgtctgagaaaaagatagacgtcaagaatgaaattctagtccagaataaacctgagacgttttctaagaattcactcatcaaggtgaaaaggaaataacttgagacccttagttataatgtgacagttttaactagtcaaatattaacttaaaaattcatgacaaatcaaaattttgttaagacacaatacgattacagattctgcaaggctagtgaacagaggcaagaaacatagctatagataagattaactgaatgtccaccatgtggctcatgacttggctttgatattttctgtagtaaaatttcaaaatttggccatgtgtgaggtctcaggaatagcccctagagaataaatatcaagtggttaacattaattcacttaaaagtatattttcaacaacaggaaatgaaacagagcgttctcagttaacagagggcctccatctcctaagtgtttgggttaatttaattttctttgtggttaaatccttaaatttttatgtcctagtacaaaaatgtcttttatgctgctgactgaattacttataattcagtacaaagaaaaataaatcaataaagaaacaagcaaaawtaatgacggtgagactcagctatcctatcaactacacattcaatcacgtaaattcaagtcttttacttgccagctgtgtaatctctcatgtgattatttacccttgctgatccacagtatattttccagttaaaaaaacgaaaacaaaaaatactgccacacatgattgaagtaggaattgcagagttaatatatggaagcccctactattgtgcctagtttagaaaatgcagaatacattttagctagttrtaatatgcatgaagtccaacacacttactggggggagatttctatttcaggtctgaatttctagaaaccaaagcaaacagagactataatcagttataagacaagatgctttcgaagtccgaaataaatttttcctgcagatcctcataaattatgacatggtagacaacactgtagtagtattcccacaacaaatacaacaagttccataaaacattgtatctatcaatgagacataatgctgtcactaatgaggagtattcacaacacaaactgtggaagatcattttaaaagtcctttctttggttttttttttgttgttgttggcatcattgataatgttttgcttttgctggttcactgccactatgttgttggtttaagtttaattaatttgtcctttatgtatagcgaatgtatagccagttactcccmtcttttgtggctttttacctttcctcagcatgcaaacttacattagaccctgctgttctgttataaggcatcaaatttcttgctaaccttcaatttttcattttaggttggtcttcaaggtaccagctacccatctcctctaacattcttcaatcctcagaataatgtcccctctatatcttacaacaaaatttgctttccattcccctattattgctgagaatgctaaataatacatttgtgtcttgttttctcagataaacagtaggtaaaagaaagcagggactgtgttacactataacacacacaaaaagttgattacttttctatataggtgaactcttaaaaatgaaagcctaatctagtataccatgaggcatccaattctgattttcattacatttattaatcacaaagttcatttcactgatacatgaggatatacccaaggactctagaatagttagctcataattagcataaccattcaaatcaaggagctatggtaatagtggaagaaaagtaaagcagatcttgaggrtgactgaaacagacgacccccccagaagttccaaagtcatgacatcccttggcggatgacacagaggataatgttatatgtacagaacacataacaagaaaaaaaaagaggaaagtgggtcagaagcagtagggctagaatcttgcagttaatatcaaaaggcaaatggcctcagacactgtgacagaggtctgaaaccagcagcatgaactctaagggggtaattgaaaggtcgtgtagtctctgtaccactaaatcctagaggtacacagtcttttctactgacttcccttccatctgattctttgtacataaagctgtatccaaaaggctcagaattcttgatttatgtgaaagcatgtggaagcaggtggggtactccattacctagtgagtcacatttgtattgttattaatacatgcaaatctatgttttaagagtctaagagcctttttgaaagcctgttccttccttttacttctttcccagtgtgggttcaataggtagttttaaggccttacccaataagcaaagaattggtgctaatcaccaactgttgagtttaccattacaattgccgtttggctcagagccaccatgcacaaggggccctgatcatcacaatttgtacttcactgtcaatggcatctttccccatttgttgataatattcactaaatgtaacccagaccccaaaccagggtcaccaaacccaggtgtatgtgtgtttggtctgaccgaccaagccttggccctggtcagttgttggctctcattagcacttcctgcacttgtccttctaggatgctgctcccaggagtaatcctaggtactttgccaccatccttggtcaccttcagtttgcatgcattcatcctgtttctacctaaagaaaagataaagttgactgacactttaagatygtctgaaggtccaccttcccaataagctacaaaagagtttcctctttttgcctctgtatctgggtgatgttcatgtcttgctaattataaccaccaaagctcaaatctaagaaataatgtgctttccttatttatttattaatttatttttttgagacagagtcatattctgttttccatgctggagtgtsgtggtgcgatctccgctcactgcaacctctgccacctaggttcaagcaggtgcctgccaccacacccaagtagctgggattacaagcatgggccaccatgcccagctttttattttttctgtacttttaatagagacagggttttgccatgttggccaggctgtcctcgagctcctgacctcaactgcctcgcccaccttggcctcccaagggaggcagggattacaggtgtgagccaccgtgcccggccttctttctttatattaaatgctgtattatcttacattggcatggtcataatccatattttgagaaagagaatagagatcacaacattaagagctctcaaattactaaaaataaaaaccttagtgccctcccaaggtactaaaaaatatagagagtgatatgtgcaacaaacatttattaactgtctgttatgtccaggctctatgttgagtgctaggaatacaacattaaatgagatacagcaccatcttctggaagactcaatactaagataggtaggatgagtaaatagatagaaagaatatacctcaggctagtcccttcttttctcatgctttggttttcccacctgtaaactaaggattgaattagaatcatgcatttcaaactatttaaaaaatagaattttcttcccatcataccctcaaataaaaccatcatacttagaaccttaataaatgaaacacatagaacaattgacctataaatttgtaacatgaaaggattttaatacctgtttcaaataacaaagaatgaatgactttaactaagcataacaaaatttttaacttgaatctctcagtaatacttattttaatttaagttgagttctcctggtactgaggtagtaagatttagaaaaaaaatctaaatgaatgaatgaaaaaaaagagaatacattgcaccacaggtagccttaatatcttctgtacatgtatttggattttttaatatggtgtttcaaaaatatattygaagaggaattgactcttatcaatgtaaatagatatttcatgaattatatattaattttttctcttaataaaacaggttagatgataaaggccaagtggttcgcatcaacttcaataacgcaactagggacacaatatttgatgtrcctgttgaaagagttcagcctttttatgctgctctgaaggagtttgttgacctcatgaacagcaaagaatccaagtttaccttcaagatgaatccaggtcagtgaatacattttctcaaataaccaaaagcatggattttcttcaaccttaaccacctagaattatatccagagcagtttttctcaggtatggcatgtagaacaccaacaacagaatcttggtgagcaactgacttgcttatgtagtggactcgtggccctcattgaggtttatgcttaattattttatcctgataaacaaatagaaatatcctcatgattcttactctaacacacacaagtgatgcttactcattaggctttactagtggagacagtactacctgaaataaagtagtacctaaagtattccagttacttgagataaaaaaagcagaaagcattatattttttctggaccatctctactcagtaaagtgccatcaaacctgaggcttttggcatctacaataaaaggtgtaatttctctctgctgtcggtttggccagatggaagattcttttcctttgtatatatttttaattgatctttggtataataagttaataggaatctccataaatccactgccatgcagtcacagcaggttaattttaaaaatggcaacatgtaaaatgaaaacattatagggggaaaaaatacaaaaaatacaagttagaatccaagcttcgactatttaatggcagtgtagttttgggtaaattcctcaattttttaaagcttcggtttcttcatgtgtgaaaagatgagagaatactttcttttcaggattcttatgaggcttagaaataatgtggcataaaatactaggcacacagaagacaaactaagaatttcactatcctttttattttctgaagctgttaaactgagaagaaacatttcttttttttctttttttttttttttgagacggagtcttgctctgtcgcccaggctggagtacagtggcgtgatctcggctcactgcaagctccgcctcccgggttcacgccattctcctgcctcagcctcctgagtatctgggactacaggcactgccaccacgcctggctaattttttctatttttagtagagacagggtttcaccatgttagccaggatggtctagatctgctgacctcgtgatccgcccacctcggcctcccaaagtgccgggattacaggcgtgagccaccgcgcccggcagaagaaacatttctaatgaggtatcgatcagtcaaaacgatacagatgttttacacagagataatattttaaataagaatgattaaaataccttcaggagactaccaggctaggtagtttaattgtcataaggtctaaagcagtttgcatccagtggcctgatttgtgtggaaaagtaaatgtgcagtttcatgtaaagaaataagcgatgattcttgatgtgaaccaagcagcagctgtgttttgcatgttacattttctagctctgtaagtcatttaaacacacaattattcatattggaaaaaatcttttctttaggtgatgtgattacttttgataactggcgcttacttcatggccgacgtagctatgaagcaggaactgagatatcccgccatctagaaggagcttatgctgactgggatgtggtcatgtcaaggcttcgtatcttaaggcagagggtggagaatggaaactgaagtcacctgtagataattttaataagattccaatgaccatattttgtgagatatggcacattattcacagaccatgatctttgtgatttacatataatttccttaacaatgaacatgtaacttctctcacaagagtactctttactttgtaatcatatacaatgtcaactttttagatgtttcaccactcttttgcaaataaagcatcctttctgctctgttgcatgcctgctctaatttcttttgyccatatatgagtatctccagaatgtctacaaatagtttttgtagcaaatgaaaatttcttcaaataagccttttgtttcaaataaaacttgtctcaaaacatgcttctaccctgttgcctataggatctcattttccaagactgcacacgaccatctttagcatgcttggaaaaggttttatatttccaaagatctgttttatgcacttttattatagaattcttttatccaaatttccagaccttgccaatttagtgattccaacattttcttttactacctaaattatgacatctaaacaaagcatgattaataaagagaaaatctagtctcacttttttttttttttttttttagacagagtttcactcttgttgccaaggctggagtgcaatggcgctatctcagatcactgcaacctccacctccggggttgaagcaactctcctgcctaagcctcctgggtagctgggattacaggtgcctgccaccgcacccagcgaattttttgtgtttttagtagagacaggatttcaccatgttggcctggctgatctcaaactcttgacctcaggtgatccaccggcctcaacctcccaaagtgctgggcttacaggagtgagccactgcactcagcctcgtctaattttatcttgtcccaaataaatactcccaaccgctgtcagcattgcttccatgtgtctacgaatcagatctcctcatttcttgtttttgactaacaactggacaaggtaaaaccaagagacaggtactacttatgaataacacgatgtctgcaaatctctggacagctttccctgctggtcccagcttcctccatagtcactgccttgccctagtgatggaacacaggtgtcactgccagcaatggaagtcctattcttattgaatccagtctctctctatccctgccaagaagacttagcattaccatttgctgaaatcctggtagttcatagatttttggacctaatcaagcttcctgttcgaaaagtcttaattattgccaccactgcagagctctctacttgttgcctccagaccaagtagaaaacattacttccattgttgttttgacttttgctgcacatccatttcaatttccacaaagtgcgcccatggcacagggagtctagatgaagactacctttagcctgtgtgggcacaccactcggacactttgaattctggtatgaagtccacatctccagccaagactcctccttcccttataacactacccctttctggggtcctcattgtccttttctatcatctggtcttgatttgggctactgtagtatatcacatgtttgattcctttgaaccacaaagggaatgagttgggttctcaatcccatacctcctaaaatgctcctagaataaaaacaagtaaattcgagatgcatggcctgattctaaaacgcaacattcaatacctaaaaacaaataatttgctggagtgaccctagattcatccattcatagcatctaaacccaaggcacttgcccagctaaagtgacttcttatacttttacttatttaacagatatttatcacatatctgatatatgtcaggcactctgctaaaataagaataccaaaggacatgaaatttaccttcttagagtctggtaggggagcagataaggatatagattataatgtgctgtgttaacagaatgaccctcaggaaggcaaccaaaccagactgggaatgctaagaaaaccttcagtctaagttgaattataaaggttcatagtagttttccaggcaaagatggtgaaataaaactccaagttaaagggtagaagaggcacagagaattgagagtagaaacatggcatgtgttgacttacaagtgaaagaaatagattacgatgtaatgtgaattctggggttgtatgcctaggttcaaaccacgtgtctttggacaaataactgttactgttccccttaagcctcattatttctatctataaatgaaactaataacagttcttatcccattacatttttatgaggattaaatgaaagttcatgtaaagcagtgttttctcaaatttctcagatgataagtcacacccatggtgcttttttaaaaaatacatcttcccagatcattccctgaggattatgattcaatgggtctgggatgaggaccaggaattatatttttagcaaggatcccaggtgatattcatcatcagtgaagtttggaaaatactgatataagacatttagcatagttccaggatcagggttagtactcaatagatattaactataaattagttataaaagcagaatttgcagaggaagagggtgatttagtatgagaagggatatatgaagctggaaacagaaacaatgatcaagtcatgaaatgtctaaatgcatgttacattaaggagttagtattttatcttgaaagcaattaggaaccatttaaaggtttttaaggagcaaagtgccttgattagatattcatttcttaaggattcatctagcttcatggtgaagggaattgtaaacaggcaagaaagaaggtcataaaactatttatgaggtaactacaggaagccagatgcaaaattaaggagcactgaattagaacactggaagagggaatcgagagatacatagaaagcaaaatctagaggacttgacccactgcatgtaaagaatgagggagagtctagcttgttgtcttatsrgtttatagttaggagaaatgggttgtgcacagggaaaagaagccacaatagtaggatcaagcttgttcagcaataaaatcgatttcgaacaaactgagattgagttgccactgagctattccatctgacagttggatatatgtgcacatagactacggaacagaaatctgaattagagatctacacttggaaagtatatagatggtagttgaaatcatcttatgttttcctggagacatttagtgatgtgaccaaagtcacatccctaatggttggatgataagctaatgatattggcctagcttatagaatcagttacactcagaatcagagaaggcttatattcaaaatccgaaatatctcttacatattatattttgtctctaaaaaaacagcattccaagccactactccatggcctgactgtttccttttctattgcaaatattatttctgtcctggaaaggagacacagaaggtttggatgcagttaaacaatttctaaagtgttatataggacatgacatattatgggctacagcagctggtgctaactgaagatgattaggtttcctggatataattgtctaaagatttgacttctccccaacctcataatagacctgatgtaagttggattagaatttacccttatttggcagtatggattcttactctctgttccatttctctgatttgacttggagaatgttagctacttggctagttcatcaaaatgactccacaggtcaccagaattacatgtcacaaagtattttcattggtctctacttctctccccagtcaaccactaaagggcaggcaaaagaatattggtataaagaatttaaacaaaaaaagaaattctatagaaaaacagagtgatgctgagggtaatttctcttcaggaatttaaactgtgaaacaagaggtattttataaacaaaaatattcctttatgttaaataacattttgaggagggatgtcaaccaaaatttcttgcaatgaaaatgtaatttggttggactttatggtttggagcatacctctgagtctctgcacattttttccagctgtctggaataccctgctctacaaccctttatgcctggaaaactccccttcttccttcaaagttcagcctaagattggtccgcaagatgataaagccggaggtttcccactcatatccctccacagcaactataatttggcagccatcaacagacaaaagtgcatttgtagaagctttgggaaccacataggcggtttgaaatccagtgaagctcaagaccaaacagggctgttttgaaaaggcaagtctacacccaggtgtagggctcactgaccatggtaccagctaaagaccccaaaacagcccccaacttcctatggacttagatacacacctgtttagcattggtcttgccagcagtaccatctgccaagggacccaggagaagtcacacccccactccgtgccttagataacaggcctgctgaccacagtcagctgaggacactgaagcagcctgtgacccatctccagtcttgtgacccaccaggatccatgcccctggaggcagactttcctacctcaatcccatagcagatcttgaaacaaccctgcaacttggctctagcccctttcagttgcagaccaagaatggtcctcctctgcagtgacctgccaaaagacatacccattcatgtcccaagaagcagatctgccaacttcagtcagactacatatcctgaagtagccctagaaaatggctcccgtgagcccagcaggtggcatacatatccgtacacctggaggcagacatacaggctacactctcagatatagactctgaagcagtactataacttgattccaagccaccctgccaaagaacccacccagaaacctacctagtaacctggtaagagccatccaaggggcctggcaagagccagaattgtctgtaaaccagatagcatgccagctgtccatgaacctaactgctgcagaccctgaagtaggtcctgtcccggctgcaatcttactgacccaggtcgtggaggcagtccagtctacccagggaccagacaggatccatatctgaccagctctggtaataggccaaccaatcactgaacccatgatagaccaatcagcagccatgtaaactgaccccaatcctacacaactgtgatcctagaggcaatcccatcagggaaaggacccaacaggaaaaggtctttacctgccaaacccagtctgtaaaaattggaaaaggcgtttgctccttcaaatgcgcagacaccagtgcaaggcttgatgaaccacagtaatggaggcgaatatgtcatcactaaaggaaattaaagttttagtactcgaccccagagaaatgaagatctatcaattttctgataaataacacaaagtaatcatctaaaagaagcttgacaagatgcaagaagacaggatagacaactaaacaaaatcaggaataaaatacatgaacaaaattagatgtttaataaagaaatggaaaccgtaaaaaaaaagacctaaaaagaaaacctgaactaaagaacacaatgacagagttgcaaaagcaatagacagcttcaccagcttactcaatagtgctaaagaatcaggatacttgaagacaagtcacctgaaattatccaatgagaggaacaacaacaacaacaacaacaacagaaaaaaagaatggaaaagaaggaagggagcatatgggacctaaaggacagcatcaagcaaacaaacatatgcattgtgggagtccaagaaggagaagaataagagcagtagaaagcttatttaaataaataatgtccgaaaacttcccaaatcttggtaggaatatggctatccataatcatgaggctcaagcaacattagctcaaagaagattacaccaatatacattataatcaaattgtcaaaaatcaaagacaaagagagaatcttgaaaccagcaagagaacagcaactgcagctgacaagggaacctccataaagctatcagcagactcctagcagaagtcttacaggccaggagagagtgggatgacatattcaaagtattggggctggcagggggtgtgagggagatatcaatcatgaatactatacccatcaaagctgtccttcagaaatgaagaagagataaagtgaatagaggcaaacatgtcattcctagaaaaacagaagctgagaaaattcatcaccactagaccagactacaaaacatgctaaagggagatcttcaaggtgaaatgaaaggacactaagtaacaacatgaaaacataagaaagtataaaattcattggcaaaggcaa

SEQ ID NO: 95300 - DNA, 45180 bp, Homo sapiens
gataatacagataactaactcatatggttcatataatcttccctaaacctccaactacccttggaggtcagtgtggccggtgctgctgatcagccaccgatattcacttcccttttcttttataatagaatgcctgagttttgtcaagcccatggccacccagccagtgactacatttcccggtttcctgtatagctaggcatagccatgtgacgaaattctggccaatggaatgtgagtagaaataaagtgtgctatttccaaattgtgccctaaaaaggaaaggacatgggctccctttgctcctttgtcccccttcccactggctggcatgcagttatgatcaagtgagcagctacattggactcagagatggaagctatgtattgaggatggcagagttgcctaaccagccctgtaccatttaggtctgaaatgctttattgtgagagaaataagctttgatcttgtctatgctattttgttggttttttgggaggctctttttgttatagaagcttgggtgatacctaatatagaaggcgttactatctccattttacaaaagcaacatggtagcttagaaaaattaagtgacttgcccaagttcacacagtttgtaaatggccatggtgggatttgaccccaagtgctctgatgctagcgctggggctgttaaccatgtaccatgctattttttctcttgagccctactaggtaatgatctgggtttatggtaaagaaagggagaagagagctacctgttccgttccccctagttgaccattcctagctatgaccaatggttccacccaaacatgtatacttcataactattcatttctccacagatgcataattgtgtgtgctctcagtccataatgaatgtgttgattgtctatgaggtttgactttttatttttattgtcagagtacaagaacccatgtctggtttctgcaaacagacttaaacccaaggtcaagcccaggtgcaacatttaaagcataaacaagggaggcaagcaaaatacctctgagagagcagcactggaaaaataacttcaatccaagcatgtgaatcccagtagttaaacatgactggttgacccaggccttgcaggagcccagaggcaaggagggaatgtgggtgagccgcaggagcttaagctagtcaaagtcaagttcagaggccagtggacctgcacaaacttgaaaaaggctcaacacctgttgtaaatatttgcttgctactgagtcctactcaagccatctccatatcaccatgaatgaagtcagacttttagggaaaagtggttaacaatckggatttctgcggtagcagggtggatcatataatgcttactcctgacaccacgcctgacacctattcagtttctcagctttactcaaagcctccatgacttagcaggttcaggttaggcgaccttcttaggtaatcctaataacagctggccttcccttctctcagcactttttccccgtgttattgcctgattatttgtctatgtccacgtcctttgctgctgtactcccagagcccaataggcagggggcccaggacacagcagacatccagtatattggatgactcccatgggttagtggttatggctgaacataacatgagaggccttctctctcagaagaatgtgatgaaatatgcaattgatgaacatccagaatccagatattcacctrtcttgaaaattgcacttccaatccacactctcagtgcccgtgacagtataaactagctcgagcattgcagaaaacaatcaacaacatgtcacaagaaccttaaaaagttcaaatgacttgaaccaaaaatgacctctgaaaacaggtcctaaggaaataaatacaaatgtagaggaaggatgtcactgtactgttatagaagaaaacaatttaaatgttctcagtaaaggagtatgtaaataaaggaatagtcctttgattgcaaattgtgtaggcataggagaaaaatatcacattttggaaaaagatttaatgacttggaaaaagttttatctgataatgttaggtggaaaaagcaggatataagattatgtattctataggatccattgtaaaactctctctcacacacacacacacactcctttacaaacatataagagagaaaatattggtaaaaatgttacctgtttatcgtaatctttgaatgattgtttgatattttatcctgcattttccaagcctccattagtaagtataaaaaataagttaagggccgggcgaggtggctcacgtctgtaatcccagcactttgggaggccgaggtgggtggatcacgaggtcaggagatcgagaccatcctggctaacacggtgaaaccccgtctctactaaaaacacaaaaaaattagctgggtgtggtggcgggcgcctgtagtcccagctactcgggaggctgaggcaggagaatggcatgaacccaagaggcagagcttgcagtgagccgagatcttgccgctgcactccagcctgggtgacagagcgagacttcgtctcaaaaaaaaaagaaaaaaaagtgaaggtaaaaacaaattcccaattattatttctatgtttcttctgttttttgttttgttttgtttttgagacggagtcttgctctgtcacccgggctggagtgcagtggcatgaccccggctcactgcaacctctgccacctgggttcaagcgattctcctgcctcagcctcacgtgcagctgggactacaggcaagagccaccacgcccagctaatttttgtatttttagcagagacagggttttgccatgttgaccaggctggtcttgaactcctgacctcaagagatccacctgccttggcctcccaaagtgctgggattacaggcatgagccaccaggcctggcctatgtttcctttttttgcaaacaccagatcagtagcgtggcacgtaaggccgaggcgggaaaaggcacatccatgttcttctccttagcatagctcatgctatggccatcaccagacaccagaggacatctgggttgcctcctcccaagtaggcaattattcatattaaagcgggaaagatatggtgcagccaaataggcagagcagaaggtatgtgctgctactgcatataacaccactgctactttttaaagcaaatcccaccttcttctttggcttgctcaagcctgttccacagtgaacaggagtcatggagctgtggtgatgtttattctcttctcttaaagccaacagccaatactgaattgtaactctctttgtttcttgttgtgttcttttctcttcctttttgcctaactctgaatttacctcacaaggccactgtgaagagaatgaaactgaaatatgtagaacattctcggcctctctgaggatgggtggaatcagaacagagtaattaccccttgtgctgtcttgtatgcctgtcatccaacaacacatgatgttcattctctccattcttttcttgcaatactgatgaaataaaatttgtctataaagattcctagctgagtactcaaatgtttttcttgaacatttgttacatggtctactttgcaagcttggtttcaaatttgttgataccaggattaataacagtatgtcttgtgccagtatattttattttcattgagttctgaaaattgacttcagagaacagcatttttaaaataacatttttatttatatcaataaaaatacmcatgaattcatatgactaaaatattaaaacctagaacccaatttgtttaccyaaccaatcacttgcaattacctttaggtaattgtattggtttggtttcaagtattttttaactagggctgattttaagaagtgttttcatttaagctgtaattatagtcgatagaacttccacctaatatgtgactttttttaatttttaatttttttgagatgaagcctcactctgtcacccaggctggagtgcagtggcacaatcttggctcactgcaacctccgcctcttgggttcaagtgattctctcgcctcagccacctgagtagctgagactacaggcgtgtgccaccacgcccagctaatttttgtatttttagcagaggtggggttttaccatgttggccagactggtctcgaacttctggccacaagtgatccgcctgcctcggcctcccaaggtgctgggattacaggcgtgagcccccgcacccagcctcctatgtaacattataaatttattgtcattacttgtaagcctgccctttattttaaaatacaagatatgacaagatcagaaaccagtcttgtttctccatttctttctctagaaataattctttaggaattcaaatccatagtaacaaaaacaaaggaaaaaaaaacatgcttttttttatataatgaacaaaggttaagaaatgactccaggtctcttatttattttgttgatatttgtgttggttagttaagaagatgatttgctcgattatttcaacatttatttattcaacaaactgtggactttggagatgaacagctgaagctagaatcctgactatcccttaatagctgtgtaactttgggcaagttatttaacctccctatacctctgtttcctaatctgtaaaatgaagataatattagtatctaactcatagggttgttgggagggttaactaagcaaatatacaaaaagctgagaatagtccctggtatatagtaagtgctcaataaattatggatgggaggatcctgacccacatggagtttacagtcttggcagtatggatcrggcaggtagaaaaagacaccaaattacacagccaacagcatctttataattgtttttaatataggaaaagtatagggtgctaaagatcaatttgtggctttcttttccaatgaactgctaaagttccacttttatgcccaagattcttatcatacttttgtaagatcaagaacaacatgtgaagtttccactattatatatccacccattatatgtagttgtactggaaaaaattaaaagctgataacttttaatttgaagatgatggtatatactatgtatatatattaaggtgcttaaagataaatcctagcacctgaggaggtgtagaaatcattcaaactctttgattacaatgacaaactagtcagtaacttactaaatattgtactatatattactaagtattttactcttcaacatagctttttaaagacacaaagcttttcaaaattcctgcttacctgggggtaaaatttggggaagcagatttctccagtgtttaaagaagccaatttggcagtgtaccagagttgaatacatttttcccatcacaagggaatacatttttcccatctaagttaagttgtttttctctggtaaaggaggaaatcaacacccatctgtacggagataaacgtttcagagtgtttttatattaaataattagtatactagtctagtaagtgataatccacgaataagttaagaagagctaagaaagaaaaagaaaagcatccatccatcctttggttgcaaataatacttacattagcgtatggcaaaatttaattttgtacagagtaatttaacccaggattgctgactttttaagagctgagaaagcatagctatggagcgcaaggccccacccagcagggtctaagtattccgtctgcaaaactggcaggccaccaacggccgcgtcccagggcggcctgaaggatgctgataaccgggagccccgccctgggttcggctatyccgggcaccccgggccggcggggcgaggctctccaattgctgggccagagcgggacccttcctttccgcaccctcctgggtatctccggtcttcaggcctccttcggagagccctgctccgagcccattgggcttccaatcttggcctgcctagcgccgagcagccaatcagaaggcagtcctcccgagggggcgggacgagggggtggtgctgattggctgagcctgaagtcgccacggwctcggggcaacaggcagatttgcctgctgagggtggagacccacgagccgaggcctcctgcagtgttcygcacagcaaaccgcacgctatggctgacagccgggatcccgccagcgaccagatgcagcactggaaggagcagcgggccgcgcaggtacactctgtgctccccgagcgggcccgaaggtccgtttagaaagcgggggcgtcggcaagtaaaggcccggcttcycccggggcggcgcttggagggactgtaccgcggctcactgggcaggggggatccccttcggtgcrgacggacttttacattcgccgaagcaggggaggggggtccgggtagtggggcgcgggactgcaggctttgttgtccgcgacaggctcgggtggttgcttcagaattttgcacttttgccaactgggacagaggtcgcagcttgaggacagattgagggctcatggggaaagaggcagagagctgcagctgcaaggaagtcagtgaggggagaagtggaaccaggctctaatggtgcccttcttgaaatactgtttacacgctttcatagttgtggggtcccagcagggcagggattgtgttttacaatcttgaggtctccagcaccagtcacagtgactggtacgtactatgcacattattaaacgactaaataaaagaacttttacattcattgtctcatttgcacttcaaaatgtcaagcctagcattttagagctggggggtgacattagggattgattaatgcgtttattctattctttgagcacctgtaggtgctaggcactgttcggggcaaggtgtacaaattccagtgcggcaagaacaacacccttgagaagctgagagtctagtctgggagacgagacacataaacagatgattacactccagcgtggtgagggctctaatagaggttatctgtagaatgtagagggagtgaccaggtgggccggacaaagcaggtgacatttgaacaggaatttttttaaatgagtaggattttaacttggtggtgggggaggcattcctggcctgtgcccacggctgcagagtctcagagggcatctatgaggaggktggattagatgagaccacatctggtctgagtctactgttggcagattggcccagggagtctaaaggtcttgccctgttccctggctgctggttaatggtagacagaggactgcagccctgttttccctattctgmctagtgctcttgctcaaaactcaggttcgtgaactggggtattaatgctaagtgctcatggattgctttaatggttccctgtttgggaaaaggctgccattctcctccaagggcctggaaaatctcccctcttggccctgttctttgttatataccattaggttggttcatgagctcttaaagtaaaccagagagaggtagagtcttagtaaaggatgtgccactacttastggcagagacaaggttagaattcagcttcttggacccaagactctttccttacccagtgggtgcaaatcctggttcacactgaagttttcatgaatactcggtgaattgagaaaagtgtggacaaagtagtgagatttttacaaaacaaaatattttctttttctttttcttttcttttctttttttttttttgagacggagtcttgctctgttgcccaggctggagtgcagtggtatgatctccactcactgcaaactccgcctcccggattcaagcaattctcctgcctcagcctcccgagtagctgggattacaggtgtccaccaccacacccagctaatttttgtatttttagtagagatggggtttcaccatgttggccaggctggactggaactcctgacctcaggagatctgcccgccttggcctcccaaagtaccgagattacaggtgtaatattttcatttttaaaggactcccctttattctgagactagctgccttcttccttgtttgggagaatcatgaactgttgaagtccctgctgttgatttaccttacatagttgcccatgtgagaaatggctgactccaaaacacatctatagttgggaggctcttaattgaaatacagccatcccctttgtccatgacatctcagggcactgtgtacatcgtcctgattggcagtcacattgatgtcttactgttcctcagttttagctgctcttagtaaaaaccgcttacttcttttaggcacttctccctccacccagggccctccaaaaggaattatgcatatgccttatagcctatataattttcaaacactttttttaaaygaaaaatttcaaatattcagaaaagttgaaaaaattttgcagtgtatatctatatatctgccatctagattctacaaggaacattttgccctgtgtcttttattacgttactccatctgtctgtccatcctttaattcattcaagttgtttcatgtattagcagtttgttcttttcattgctgagtaagattccattatttgaatataccaccatttggatatcctgttgctggacacctgggctatttaattttttttctattgtaagtaaagctgctgtggctgggcatgaaggcttatgcctatwaccctaccacttttggaggctgaggtgggaggatagtttgagctcaggagttgagaccagcctaagcaacatggtgaaaacccatctctacaacaaataaaagaagtagccagacatggtgacacatgcctgtagtcccagctactcgggaagttgagttgggaggattgcttgagcttggggtgtggaggctgcagtgagccatgattacatgactgcactctagcctgggtgacagagggagaccctgtcttaaaaattaaaaataaataaagctgctataaaaattcttacataagtctttttgtgcacaggtggttttatttctcttaggaaatacctaggagtagatttattgggtcataaggtaagtgaatgtgttatgagaaactgctgagcctttttccaaagtggttgtaccattttatacttcatcagcagtgtatgggagttccagttgctccacatcctaccaacttttggtgttgtcagtcttttacatttagytgttgggtgtgcagtggtatctcattatggttttaatttgctttgctctgatgactaatgatgcaaagcatctttttacatgcttattgaccattggtatatattcctttgaagtatatgttcaaattttctgtctttttaaaaaytgaattgcttttaaattattrattcatagcccatattttaagttcaatcatgtggaatcatgtgtaggctaagtgttataataataaatctcaacatgtatcatggtataaacatattagaaatttatggccgggygcagtgactcacacctataatccagcactttgggaggctgaggtgggcggatcacctgaggtcaggagttcaaaactagcctgaccaatatggagaaaccctgtctctactaaaaatacaaaattagctgggcgtggtggcacatgcctgtaatcccagctgcttgggaggctgaggcaggataatcacttgaaccctggaggcggargttgcagtaagccgagatcctgccattgcactccagcctgggcaacaagagtgaaactccatctcaaaaagaaaaaaaaagaaatgtattcctttcctacatgaatggcccaaagtggtttgaggttgaaggaggtgggtgggtgctctgcttcccacagttattgagggcaccaggctgaaggaagctcccccttggtcaaacatggcttttatgggcgtcactgtccagcacagaaggctcaagagcgtggagaagggtatatgagtgtgggaaggtttagggtccagggtcactgccacttacattctgttggctagaactctgttacaggccacacctggggtagtctaccccctgtccaggaagctgactctactatattatccaaagcgtacatttcatatttggtgaaaatctgtccagccattttcttgtgatgcggcaatggacatgcaacataatttctttttaaagaatatgtcatttttrctttctgacattaagatattctgttagaaaattatgacagtaacagatggtattaaaaaaaaatctccccttgcttggtaaatgcttttatctaagtgggcagctttgtgctaatatgatgtcttccacttcccaattagttgtgatgctttactgatctaggagagctttayggtttgggactactataggcgaacactctgttgcctcctctctcaagaatcagagtgtcctattttggaaacacagtcaaccatgtgaaagcaatttattgggcgtatcttctgtggtcagatttggtttgctgacaggtgaattgggagttttgtaaactttaataagtgagcattgagtcagatgtgttcatgagtatgacctcgatccacttaaaaattcttatttctttttctctcttggcaggagggaggtggttgtgcaggtattcccagccactttgaagggaacttaaatgggaactttattgctcactgcttagaatgccatgggctcttcttttgagatacttacctttaacccatttcctttttttttttttaagtgcagcttgctgccagtgctcttttcttgggggtaaatgggaaatgttaataagtagcctctgatccctttaaaatgggagaatttgaacatttcaaaccttacctttttatacagttctcttattacctgggagagaggttaagtcttagactatccatttctgtcagtgagttgcctatgcattatagcctgtgagggtctatatttttttagggtaatcctggtaataactgcattgatgttacactgctaacatttgggatggagaaggggtgactgagtgacttaacccttggtccacatgtgctttcatttctcctgaaatatacctaggtatggaatcgctaagtcattatgtgcagtgggagagactatgggagatgggacagaaatttttaaggtttcatttcttttttttagcttttgcatggtgggtaggtctatgcaaacctacccccaaagtctgaggaagctgagaggccaaagaaagaggctgacaaatcaagtttctcagaaagaaatgtttagtagggacttaggaccagaaaccatgtctgtgtcttgcgtgttggcgagacaagatggtggatcccataccattacccctcagacccagggcttaataccatagggaagggcgattcagaagggaggtatggcatgactgaagtatgataatgtcaaggttgtttgacctcagggcaggatttatagtaaataggggctctttcacaaggaataatagataaactggaaatcttaaaactggagttaatcagaagtcagcatggtggatcagtatctaagacggaattgctttagcttccacagcagtcaatatctagaccacccttattattttcccacagaccaagaaatttgaaggtcaggacagtctttggtttcctgtacgtgggtgtatacgwtgtaggcacttgaatctttgttgaataaatggagaatgttaggcagttatttgctagaaaacgctaggcacattctttatcacagaatgaaaagacgtcattatgactcctctgggactgatgggcaatttgcattaaccaatcttttaattaaaagtggaagaatatgtttaggttcttgaaacttctgtgagtgaagggaactactaagtggaaagtgtaatatgttgataaaatatttcaccagatgaagccaaccttactcctcccaggaaaacttcttcatttatgtattagctctggccaaaagaagcctataaaggcagcaaagtcaaaatagaattttactttaagtccctacttctaataattgtgctagtttttagccaagctaatttctgtggcagttttcataacaagtgtgtctaaaggtgtttgatcagaatttataaattaaaatatttctctcattttttggaggggcgatgcagggagagggatagactgttgctgcttcctcctgcttgttagaaaggctcttggccatatcatattggtccgtggtttagtttatttgcatgctgaatccacacacatttgttttatgtttgttagtatattgagcagtgtattagggatcaggtatatagatgtaaaaggagtacacagtctagagaggaaaaatagtgacaggctgggcgcggtggctcacgcctrtaatcccagcactttgggaggccaagatgggcggatttcttgaggtcaggagtttgagatcatcagcctggccaacatgatggaaccctgtctttactaaaaatacaaaaattagctgggtgtggtggtggtcgcctgtaatcccaactacttgggaggctgagacgggagaattgcttgaacccgggaggaggtggaggttacagtgagctgagaccatgccactgcactccagcctgggcaayagagcgagactccatctcaaaaaaaaaaaaaaaaaaaaaaaaaargaaaaacagtgacataaacaggcaattacaatattttgttatatggggcacaagaagatgcccttggccctgcttcmtgagtggtgtggggcagggtagagagagcagttcaggagaggtacgtatggatgtcatgggagctagcagccaggaagatgtaaacatgttaacaaggacctctccagagagaggtcttaaaattrtccagccatagagaagcttttctctctttaaaaatattctggctctaaagttattcattgagttaaaaacaataattgcaagttggaggaaatctctttgcctgtccttacgtgttacatgtaacaagtaaacctgtgccacaacactgacatctctgcaaagttacttaagttttctgagtttgtagtatcgcccattaaatgggattaataatatygatctctggattattgacaggcttaagtgagataacttgcgtggtccrttttctagccccaccctctcatttcatctagtaaatcttcattgcattaattattttcatcttaaatacaccgcatcctgctcctcaccttctaatattaatactctrtctttcagtttagatcagttcctcttatccaatgttgcgctaaacatcccctgaagttgggggatcttttcctttctagtttttgctccctggcttcccttttctgttgctgactgttgaagctttcctgccccactggctttgaaggtaaattgtatatacatgagcttgtggggaaagctgttatataaatgaggacaawtgatctaactgttagagtggggaaatggaagagattctgaagcctccatttgtaacttaaaaactcaggtttcatttcttaacaggattgatgttaaggaggggattccttcattgggcaggagggaggactgccataattccagcattcccactcttaatagtcagtgtcatcaggaaagaccacctcaagctttagtactttattcatttatccaactctgcacctgctgcctttgggtgtggtatttattcttgaccatatcaccctgacccggtaaccagaagggaacatgtgatgtgctctcatctctgccttaggggcagctccctccccacgttaagaatgctggcatgtaaataacactctcatctgtttagcgttccttttactgagcttcttggtatcttttctcatacttgtaccttttatgggatgtccccccctttttttttttgagacggagtttcgctgctgttgcccaggctggagtgcaatggcacgatctcagctcaccgcaacctccgcctgctgggttcaagcgattctcctgcctcagcctcccgagtagctgggactacagtcacccctccactgcacctggtactaattttgtatttttagtagagacagggtttctccatgttggtcaggctggtctcgaactcctgatctcaggtgatccacctgctgcagcctcccgaagtgttgggattacaggtgtgagccaccgcgcccagcctggatgtccctttattttttaaaggcttccttaaataccttgtttgtawgttgaaaagagcatttaaagagtgaacagatttggtttgctctggctctctaattattttaactttgttatcacccaatagttctaggttagtggttttcaatcctagcttgaacaggagtcatttaaaaatagcccaggcctcacccagggcacttctatcagacatctctaggggggatggcccaggcatcaggaggctttaaaaagctcctcaggtgattttagtgcattgccaaggttgaaaaccaaggctttaggtttaaactaaaggtgaaattgctctttttctggttcrttttctactttagaaagtagaaattttttttctggttcattttctactttaaattaaaaataaacctacagagggtaacacgtattagcacgtcacagagggtcacacgtattagcaacatatgtatcttcaaaagagtgatgtgactgggtggtaagtgttgattggacccttaaactgtgacagtttagaaggggctttgctagatgggtttagggacagagatggtagagtgagagagtgtggatggaggagtatgcatctgtcatgattactagaaaaataaaacttcaaatgctttgctccttctgctgcgaggtcatgttctcacagccagtgaagtgacagcatatatgtgytgaatgtgtggcttgcattttacatttarctcttttaattcatgtgttaaccttaggaggtacttattattctattttgcagatgaaaatggagactcataaataagtaacttaccagcagctacatagctggtaattggtagaactggaagttggacccaggctctagtgctggcactcatagtttctccctgctgccatgttggcctcttcctacttggatgaagatataactctagtggcaagggcatttactagtgtgtgagagggtcttgtttattagttttgcaaattgcacggtctcctttattcaatatcttttttcaaacagctcacagatcttttgtggttttgtaagtgcctactccccaccgtattgccttctagagaagaggcaggaatttattttaatgtacaggacagacatgcatggggagtaaaactacagactccactctaggtgtgtggaaatactaaaamtagtgcttttctctgtgtgtgaagttggtctgttgagttttgtcatagacagcgttgagttcctctcccaggtggaggtggcgtagctttgcgtcacttacgtgtctctcctgatttccagtgacccggggaagacactgcagaggcagttgtctgtggtcaaaagtattctctgaccatggaactagatgaagctatgagcttccaggatcatgtggggctagaagaatgccgctctaaccctagaggagggacagctgagtgtcttctgatgtaactgaaattggagaatcaggtggattaaaattaattatttattacagtaaaataacctatcccatttcagagacatttgctatctttaaaacattaatactataatccaccttaccagtaacagtttacttttagtgacagtgaaagccattgactttttttttttaattgaaaagagatgttgcaaatagctggtgtacatttcttgagatgcactaaacaaggtagcgcacttgaagatcgtggcagtaataaagcgtttgtaagttctgagtaaagtattgaccagcacagcttccctggagaccgtcttctcattgctggattggacatttcactgttaagcttgtaggacgcttttgggcacctctctgactgggagctttgcagaacccagtggctttctctggagcaggtgctgagcacattttcaggctccaaaatcatctttctgctcttcagagcaagtttcttagcagattagtgttgagatttgtcaagggtttctggggcatcactaaaagtttcaggcaatggcccatcctgtcagattttagtactttggacacaggaaattaaaaaagagggcagatggtataaacattgcaaagctatgtacccgtgacartgtaaatgaaaggtttgattgtgctaactctcctgcactttctttctgtgttcctgtagaaagctgatgtcctgaccactggagctggtaacccagtaggagacaaacttaatgttattacagtagggccccgtgggccccttcttgttcaggatgtggttttcactgatgaaatggctcattttgaccgagagagaattcctgagagagttgtgcatgctaaaggagcaggtaagtgctgtgtttatttgctgtaaaaagattgtktcacagcacctgggtcaagtgttatttcccaaaggattggaagacctttaacacaagtgtcaaatctccatttgtgggagaaaggaaaaacatccagcagtagggaaattagtaaataaatgatggttatttcctcaggttaaacattatatataaaatagtttcttttaaaaatagcagtcttccatttctcccatcattgaaggaataaaaatacaataagtcctcacttaacatcaataggttcttggaaactttgactttaaacgacatgtaatgaaaccaattttatgataggctaattgacgtaagcaagagttaagttcctatggcatatttctgattgataaaacatcatcaaacttctaaatagagactcaaaatacctcttatattaaacattgaaataaatgtgagccatacatacctttaagaaagattagtaaaataagatagttatttactagcttattccagttcaaggtggtgggaggccagagcctgtcctggcaggttggggtacaaggcaagagccagccctggacaggatgctgtccattgcagggtggactcacactgggaccattcagacatgccagttcacctaacacgcacatctttgggatgtggggggaagctggagtaccaggagaaaacctatctagacatggggagaacatgcagactccacacagatggtggcctcagctaggaatagatttttttctcatcaacgttataatgaaacaacgttgaacaaaacaatgttgtttgaggacctgctgtacagaaatacagacatagacacrtgcactgcaattgcaactaagtttaaatgatgtacttactgggtaattactggaatgagctgcaaaatttggggtagttatgttagggtggtgggtttgtgatgatttttcctttccttttttccaacaatttctgtaaaactttctttatcgctgttatatcagacacaaaagatgggggtggtatttgaaagaaagtgaaaaactcagttggaaaaagagctccacagaaaggaagtttttctcttagcttgctgacttggacttccagttaggacttctgcatttcttcatctcttcttcctggataaggtttctccccatcttctccagtggtttgtgtgtatttttccatcttgacttgtttagtttattgcttgctttgtatcatcgttgctaagtgttgaaaagattctttctcttatgttttcatctcctcttctctctgttcttcactttctctyataggtcctacctgtacttcaggcccctctgagaccctgtgtccttgggccaaccttgacgacttctagcctcactcacctccttctcttggctccagctatgtggcattcgacttagcactgaatgatagaatagggctttgcatttcaccctctttattttgtgtttgggcatttccccttcctccaacatactggaagctcccagaaggctggtgctaaccatcattttctcttgtcacccaggtgcctgttgaggacctgaatgtctgagtaatggtctcatggtaaggatttctgtgtctttctcgttaggggcctttggctactttgaggtcacacatgacattaccaaatactccaaggcaaaggtatttgagcatattggaaagaagactcccatcgcagttcggttctccactgttggtaagttggtttattggcgtgattggtatggcttaactcaacttcaccttttggggatgtttataacttaaagaaaaagttattagaaaataggaagcaagcacttctccaaattatgtcaaggttttrcagtagaagacatatttggagacacataggaagttacttgtatttctgtttgttgaggtcttaggaaatcacacttacacagaggctacctctgcaattctgtgacatttggaaagagctttcctaaaagtggttgcctctaacagaagaatagagtggaaatcttatttaataactatgcctacagctgacctttattgagaattaattctgtgccaactgtggttaggtgctttacagatataatctctgatttgtagatctactttgcagagtgggattctttttatttttgagaggctaagtgatgtttctcacgttacagagatagtattagatctatcatactatatttcaacatacctagtgcttcactagttccgtttctgtgtcagtctctgcattttaaaaatactgtggaatgtaaaaataaatgaaattaagaactaagaaccaatattttaactcattttcttaatgttaacctcatcattttgacaactcacttattctgtttgtcactactttaagcctcataattattttcttcccttattttaattaaaagttcaattacctgtttgaacaaagttatcttattatggtaaatgaatgacattgtcagctgttattacatgtgttctcttrttgctctcaattaattattttgtttgatttgtggactgaattagctggtgggtagaaataataacccgggcacttaaatacctaatttagttcttggaagtggattagaaaggatggatccaggtgcttctttatgtctccaggcttcttggatgcaaagtgctgtggcttatgcttcctgtttccatttgaatattgtagctggagaatcgggttcagctgacacagttcgggaccctcgtgggtttgcagtgaaattttacacagaagatggtaactgggatctcgttggaaataacacccccattttcttcatcagggatcccatattggtaggtaatagagtattttgcactcaacaaatgtttgttgacttaaattgatttcaaataggttggcatttgaggagaagccgtgggaaaggcagaaagaaaagaatgcgagttgtctggactacttttttcaacacatttttctgtatttaataagataaagtaagaacagttaccattggtcttagatttgtcattttaagacagattgacttaatgggaagtgagtttagttttccttgcagagcatcgaagattagtaaaaagagggactttactttggaaacaagcagygggtgtctytacatgctctgagtcagcaggagggggtgtgtgtgcgtgcgcgcatgcgggagggtgggtatattttttccgtgaagaaatactataaatcccagcactttgggaggccaaggcaggcagatcactggagtccatgagttcgagaccagcctgggcaacatggcaaaaccatatctctgcaaaaaaatacaaaaattagccaagtgtggtggctcatgcctatagtcccagctacttgggaggctgaggtgggagatttgcttgagcccaggaggtcaaagctgcagtgagctgtgatcatgccattgcaatcagcctgggtgacagagtgagaccctgtcttaaaaaaaaaaaaaaagaaaagactatagttttgagtatatttgaaatactttagggtatcttagatgctagttgtctatgctgagtaaatttcatattatggtttggcagtttaaaattctaggattgtatttagaattataatccataaacctagtaataggcatatataatgaaagacaccataattcctgtaaacttagtttttggatttttttctctcttttttctatttagtttccatcttttatccacagccaaaagagaaatcctcagacacatctgaaggatccggacatggtctgggacttctggagcctacgtcctgagtctctgcatcaggtatgaacccttttttgccattgtattatatcacctgggatgcagtgtttaattatgcctcttcataaagtgtctctccagttttggctattttattggaatcagcttcctcagatttcttgatcgtgaagagttttgtagtaactggctttactaatcatcccccattcatcggccttaaatgatgatgatgatgatgatagatagctagcaacattgtcagttgatatttagcagtagtaaggatgaaagtctgtagtgtaaggtaaagctctgtattaaggaagtggggggaaagtagtaccaaacaaatttgctatgcaaataaattttgaataacaaattaggccagttttcwggttgttttggctttccttcatagaattttgagtcatagtattagtgatttgcatatcattttgatttaaaatttttctgtttgttattttctacaagtgaaataataatggtaacccttcccatgggaaattggctagtatgttttatgtcattaagggactttctggaaactaaggaatatcttaaaaatmaaggatgttttgatttaaatgaaaacattttaggctttatatttctgttctttaggtttctttcttgttcagtgatcgggggattccagatggacatcgccacatgaatggatatggatcacatactttcaagctggttaatgcaaatggrgaggcagtttattgcaaattccattataaggtatgtgttacctttggggcagagggtacaaggctcctaccgcatacctccttatttttcctgaaggattgagcaaagattaaggcttctcccacttttccctcacctccatccccaaagttgggaagtattgatctcattgatcagtactgattttgttggctaccatctgaggaccttggagcgtatcccaatctcattatcacttccaacatccaatagtgtctttccaatatcatttcttttaactttttaagtcatccatctatttacttwgcatttattgaggttttattatgaacaaggcatataagyaaaatcaattacaaatgtcagaaaacaaaattatactgtttttaaaaatttgcattcatatagccagatcaaatcagttacatctggggagggttttgagaatgttttaatcaactgaaatattataaagggccctcttttggtataagcatggcatttgttacaatgagcaatattgccagtgaaccctggcatgttagtgatattcccagagaactcccaagggctagtcagaaacaagcctgagaacctctgtttccaaatactgctgctaagataagcagaaagaagtgggctcgtgaccagtactggataatctctctcttagtgacatccaaaagccctattttcttctatcctgctttcttctttatctgaacaatttaatgtaggtatatcaaacaggaaaactatcacctctttttatattcataacttggatctataatatttgacaaggaaaaattttatgaaacagttgacccattggcttgtaattgccaaaagggtcaatgtagtattacttagaataagactaagtggttgtatctaggacagccagtctagttggtagccttggagttatgccagcctgaactcaaatttctactctcctagataattgtggccttgggcatagtattaaaagttctttgagctccagttcttttcactgtgaagttggcataatattaccagctatacaagtcctggaaagattggattgcttgtgggtcttttatcctagggycctaaggtagcctgagatctacatggattcatcagtctggattattctgacctaagattattcttttctaaacctaaaggattcagttaaaatcagaaaggtattgcagtgttattgtactacttaatatattagctctttgggcgatctgtacatggtgaccttcattgttttaatcctgaaggtggctttacttcttgttcagtagtaagagttcaaaccttttcactgatgagacagttgggatttctgtggtagaaatagaccagcgttcagagttgatttttgctaaggaaatctttctgcggcacttggcttgttgggaggtctttgagaataagatcacatggtcagtccatcaaagaacagtatgatatgataacaggagcacttatgaagtgacacagcttctctgggttttaatgtcttgcttggaaagtcagaatattaattttgcctgctcatagtcagagaactagttccaggtggctgtactgaagttcttttcaactctatgagctatgattctatgatttattaaaaaaaaaaaaaaaaggaataggacaggggtgaagggatactggcygagcacagtctcagtaattgatttgagctgtcatgaaatggaattaaaacattacttcatgataaaaggcaagtagtcctttaattttattaatcttttgcctacttttaagtatattttgatttttctgatttggaaagtaacatgagtgtaaaaattcaaataatagaatacataaagggaaagataggactgattttaaatatgaaatgtgtagatgggattcccttgacatttaaaagtattgggataatcaagtagaatttcttgttgataaattcattagtatcagatttgaacaatagaagtattgttgtaaagaaagttcattctttgggcagtgttactcataatccttcaatgaattactgatgaaattttgataactttgacaataagtttccattggagcttctttctttcattttgtagactgaccagggcatcaaaaacctttctgttgaagatgcggcgagactttcccaggaagatcctgactatggcatccgggatctttttaacgccattgccacaggaaagtacccctcctggactttttacatccaggtcatgacatttaatcaggcagaaacttttccatttaatccattcgatctcaccaaggtgagtcagtaaacaactatattgttttcttttttaagtctcttcttacctaattagaaaaaaaatctagtcaaacaattataataatggggaagtcatatacaaaatacagagggtaccacttcasagtgtcctaagctgtgaatgagtgcttaccagcatcttacttccacgttcctgtttgtcatttcattgagtatgtgtatgtggcttcatatattgttattaacagggaacagattatgaaaagctgatgtactttttcctggggaaactgtcagtatttaccacttactattgtgaaagatttaactaaggcactcrtcttaaattcttatgttttattggatttaaaaattattttcattggcttgattgtatttgaaatctggtatttttgtgggtagctttgatttccttcagttgattgcctggtaattgtgaatatgacatcattttcaggtttggcctcacaaggactaccctctcatcccagttggtaaactggtcttaaaccggaatccagttaattactttgctgaggttgaacagatagccttcgacccaagcaacatgccacctggcattgaggccagtcctgacaaaatgcttcaggtgagcctggtggattgagatgttctgaggcaggtgtccatgtgagcatgcacacacaaaatatgcagcttggcatgatctttatgtgaggaattaacaagaacattacttaaactttaatctgggtgcttggttaccttgtgggattcactgaggtgaactattcttcaatgagcattccttgagtaaaccaagtataaacaaaagtccatggtaagatccctacatatgtgaagacaagaatacttactctcttaattaaaaaaaaaagacataatagaaataccttaagtattgatagagtgaagcatggtttgttctgtctgtagctgaagtatggttaattaattataataccttggtaagcctaactttattttcttgttcttttttttttttttttttttttttttgtgacagagtcttgctctgtcgcccaggctggagtgcagtggcatgatctcggctcactgcaacctccgcctcccaggttcaagcgatcctcctgcctcagcctcttgattagctacaggcgcccgccaccatgcccagctaatttttgtatttttagtagagacggggtttcaccctgttggccaggctggtctcaaactcctgacctcaagtgatctgcctgcctccgcctcccaaagtgctggattataggcgtgagccaccgtggctggcctcattttctgtttcatggtgatgcttgaatttttccatttgtaaaaagagatctagggatgatctttatgaactacatgtatgctgccagtgataaaagcagtggattaaccattcaccttgctaatgttaagccatcagtatgttttacatcactttttaatatctctttcaagagtaccaagagtgaaaaattgtactttggatcagaatcagtaagaaaataattggcttaataattactgtataaatcaatcttttgtggttttagactgtgaccttgaaacaaaggttaaagattgtaccctaaatcagaccacagcgactgaaggttacttcttatgtaagtatctgattccagttcaggtttcagtctgcatggaggayaagctaagattccgtttttaaaaaataacttttttgcttatgacattggggaacatctgaggcttttatagaaagtaagtttttcattagtttttagtccaattcaactgttacaaattgagtacctgtctgttgtgtatggtggactgtcttgggtgccataatgtaaggcagaatgccatggtgatccagaaagcaaaattttgtctgataggaggtcagccacgaagtttcatgaacgaggtagcatttgagattgttttgaagaatagataggattttgatttttagtaggtaaaatgcggcaggagaaggacatgagtataggcacaaaggtgggacatgttaggtgtgttgaaactataaacagtcactctctcctgaatgagaagaatagagtttgggtaggttcattgagtatatgtcagaggggaccttaaatgcttgagtaggagtgaaaagctttcttcagttttgagaagtgtggtctgggatatattgagtagaatcactcctcttggtgataaatagaaaaagcgacaactagggattgggaatagcaaaaggaaagtcaggcagttctcagaggaaaagcagaagtttgcattgaaaccagggagtagaggaagccaaaacaaggtaatcctgggccctaaaactccctacctggtggctgaactgtgagaggatgaggctaatgggatttgccaaggcatgaaattgtcatgggcagagcagaggctgcataaccctggttacccagggagggaacggattgaggaatacaaggttacctaaactcttttcacaagaatccaagtcaccatgggtctctggaaccacagtgggaccgtgaggcagtcagcagcactgagtcatataatttgaagaacaatgaagatttgaatggagaactaggcccccgggaaaaggactgcaaagcaaatacgtattctctacattcctaagaaagcaaatgtctaaggcagctattcaaacagtggggaagagagttctgaaaaaggatgacaagtagaaagtaatataatttctgttagtattaattttagttctggcaaatatatctattttaaattcagtgtactctttataggttgttttttttttaaatgagttttagaaactgttcgaaagagctttcataagtttgtcgagttattgtttctagcctagctttcccccatccttcttaggtcatttagctatcagttccaataccatggagcctgtgaggagccatacagttggggaaggactgttgtactcatttagccatttggtgaccattaaggaatgatttgagattttttgagtaggtgagtagggaatatgtagattgtcttgttggacaggaagtggaaagccagttaggggggctttggggttattcctgctgagagctcatgagtattgtagcctaggcagtggcggttgatatattaatgggcagtgtttacaggtgccttttaacaaggtcatgttattaagttttataactttatccaaagtggtgagccacaccatggtgaaatggacaaataatataatacaagtcatagagagactgtcctgtcccctgagtacctgaggacacaggtgcagcctttcttgctctcattctctgcattttgccaakagttggagaagttgggccggttgcttgggtgggaaaggctttcccactcacgcaggtccagcaagggagttcaggcacagggccttggggaaggcctagattcaagctggtgtcagggtatggcctcactgtgcccatttcccaacctttgttggtctccacccataggtggggtaaggttgcctgataaacacagggtgacacaaaatcagaattaggtgatagaggctacatccaggagctgcccatggcaggattgtatctcctatcctgttgatggagtcaagagcacaactttttgagccaaaggagacaaccagcttccaacctatagctgagttttggtcatggccgcatggctagtcatctaaatatgaccttaggctatttgaaatgatgataagagggagtcattcagccaaaagcaaaatattgacagaacactgggactggattaagtctgttggtatcagtgatttggaacaaagttattgcttaagttgccctattcaatttggtttttattttgcctcatagaattagggatataaaaatacttttaaggttcaaggccaatgataaattcaatggaagaaaaattgctcatagaaaaggagtatgaataatgagaatagttcaataattagatattaagattaatgcagaatttatcataaagcttttgtttgagcattaactgaaagaaatttcaagatgcttgccatctttgccttgattaacatggaacataatttaatcttagattgattacctttggcattgtagggctttcattttgaaccacagattttttgttattgttgtttatatctagaaagtctcagagctcaaagtgtttctgagataattcagaaggcagcatgggagtgggcggtactttttttttttttttttttttttttctgatcttgctttgttgcccaggctggattgcagtgacacgattgcagctcactgctgcctcaatcccctgggccaagcagtcctcccacttcagcctgttggagtagctgggactacaggcacatgccaccatgctcggctaatgttttaatttttttttttgtagagacaggtctcgctgtgttgcccaggctggtctcaaactcctgggcccaagcgatcctctcaccttggccttccagagtgctgggattataataggcatgggccactgtgcccagttggaagwgcttatttgaagaatttcccatgctgttggttttgtagaaatgtgttgctttttgtaaagagcaaatgattggttccttccctggagtgggggaatgaggaggaatagaattaattcaatatttcagttagttaacgttctagcacatttattttataatgcaatacttccttgggaataggaagtaatactgtataagacaagacactaacttgttatgcagaaggaaaaaaaaaagatattattaccaaaaacagatgtgaagatttatggttggccagagggcctgggaaattcagaactgttcagttagggagaactcgtttcataagagtagaggcttcactcttaagtagcgggaaaggcagaattttgtggtaaccatgtacagagtgctttgtacttcaaatttcagaatgaagtttacagcccattcctatgttatatgttactgcccctagtcagtgtctattgtatttattactgcagggccgcctttttgcctatcctgacactcaccgccatcgcctgggacccaattatcttcatatacctgtgaactgtccctaccgtgctcgagtggccaactaccagcgtgayggcccgatgtgcatgcaggacaatcagggtaggcctaaagacgttgggctccccctgcgtgggcagagggcacgtggagcagatgggcgggaggccaggccagtggctctcaagctggccccgcaggacctcctgcttggtaaaggtgctccccaggtgctgctaactgggcgcttttttgcccagcagtgaagatttaggctgcctgaggactctccatgctttttatctattttatrtattttattgagcatttccacctcagatgttacttgtatccagtagttaaaagcagggagaaagatctttcrcactggctagagtacagtaacatccagcttgggagttaggttttgaagacacttcaccaaaatggacaattccttaactcactgtgaaatcaccaagacttagacccttggaagtgcgaaagccaagagttggagtcttctgtttctctttgcagttctgctgtggccctggaggagcaggtctagctagaatttggaggggagctagaattagcagggaaggctggggagaagagagtaggggaggcagagcaagtcaaaggattcccctcccttcattttttcctaagtgaataaagttaggtgaatcaacttaccactttttgttttttggaactcatttatcaaacttaggatctttttcttttaactactttttttttggtgtcgtatacaaacagcctctggttctaattactttttctaataagtcaagcagaatgcttgattaaagttttttccttttactattccacagtttaatatagatcttagttattttcttttcccatttaggacacgtgttttagtaatatagactgcatgcattgatccctttagaaattttactgatgatttatatttatagccacagatgtctatattcaaacaaagtttatttttctatgataaaaataatacaagtgtcctaaagaaaatttggaatatataggwaaaagaagaaaaaagaaaaattcccatatagtcccaacacccaaaggtcatagctattacattttgctatatttatttatctatttatttattttttagacagagtctcactctgttgcccaggctggagtgcagtgcatgatcttggctcactgcagcctctgcctctgggttcaagagattctcatgcctcagcctcccgagtagctggaagtataggagtgtgccaccacgccagctaatttttgtatttttagtagagacagggtttcattggccaggctggtcctgaactcttgacctcaggtgayccacccactttggccccccaaagtgctgrgattacaggcatgagccaccgcgcctggcttgattgtaaaagtagagcwtttgggctgtgaccctgaagctcagtgaaagagcttaattgttcctgtggtcagtgctttaaagacaactaccactttgagtaaaggtcagggctcatttggaagtaggattttaaaaattaactaggcacatttcaaagagctagttcttaatgaagaaaacactgtgatggctggtttttggagcattttgcttttcatgtagatgtgactgatctgttgaatttgttgagtgaataattgggctctataatagtayggtgttcttccttcccctacacacacacttggtgtcttgatgaatgtcatacataggcacctcttgattatccactgtggataatctattacggcagtgagctggctaaaattccaaccccagattggtttgctcaaaccacttaatatgtttctgggccactcctgtttaggcagtgtgtgctcgggtaatgaaagcttytgctaatgtcagccaaagcatagttgagaaaataaatatgctaaaacgaaaaaaaagccttataatttatttcaaaagtcatagaaaatattttgattgtatttgtcactgtttcttataagtccagataagtaagtgctgatatacaattaccacattttaaaaaattctttgtttattggtctgtggagggtatgaaagtgaagctacaatggaacaaagtcatcatygtcagtaaaggagagataccctgagaatcctaaaaacactttacggaatagcaaagtagagttctgtaatggaaatactgtatatgctgggctggaggagacaaaaaacccagagttccaaccccatatctaccactggctaccgtgtgaccttgcagcagtcaggtcccatcacagagctccatgcttgtgtctgtagattcaaggagcagaaccagaactttcagatttccctcaagaattttgtgatgcagtgtttgaattgagcccaagtccaaatgacacaatttttcaagtcaattttgaaatgtgtctttgagcctcatccctatatggtggccaaatcaagcctgtataaacttctacatgtgctgtacccctcagaagacttgatagatgagaccctttgaagtgtcaaaagggactttgagattcattcataaagtgcggcagcctgtgcaagcatttagcagatggcagcrttccctaagaatcttcatactacctgtagctaaatgcgggaaattaaaaataatatgtgtgcgttgtgtttatatctgtgtatgtgtacgtgtgtatttgattaccacttgaatttatttctcatcacagtgattatttgcagacttacttgacttttcttattcctaagtgcatctgggtggttttgttttgaaggtggtgctccaaattactaccccaacagctttggtgctccggaacaacagccttctgccytggagcacagcatccaatattctggagaagtgcggagattcaacactgccaatgatgataacgttactcaggtaatgacttctctttatctgctatggaagtcacctgctaattctccttgtcaatgcctgcataatccccctccctgcaaatgccccaactgtctgatgtatcttaaattgaattcaaggaagactcatctgtaatagtaaattgggccccttactgggtggagttgaagggttatattactctggtcttttgcctcaaagcatgcagactccgtctcagtttcttcaaactttattgaagggatatggggagggggcattggggaaacagttatctcatgggaatttaagaaatgagcatgtacagcttacgtggagacaaatctaagaatctgggcaggacagtccaggttcaaggactagaactagagatccaaaatagctccaggagcctcggccacaagagtgtgggcgtttccactgcagggctcgtccttcacgtggcttattctccatctgtctgcttctgcttgccaatgctaattgattatttttaccacagcttcctgttttctcctatctgcgtcagagcttctgttttatcatggttgtggctcttccacaacaatggaaaactctcctttatggcgtctttctccattattactttttttttttggaccaccttttactccttctctcaacatgtctatctctagattctagagagatggaatcctattgacttggctaatcttttcaccccaggttgcaccattggccttggtcaggctctagttaaccgccccagggcaaatgctcatcctctttccagttgcctatggctgccctaagagctgtttcagcacatgctatgaaggmggcccttggacttggaagggctgtaggtgggcagctgcctccttaatgtgtccagtgcaacttataccacacacaataaaataataaagttaaaggtatagttgttctagagctctgtttgagcagttagtgttaaacttagtatttaaattagattagaacctatttctagtttctcagtttgtgaatgtgggttccaagtaaaaaatacttatacatgaattaattcgctgtgaggatatctttgcttgaaaagcatttacgtatatacatatatacgtatatataaaaaagaaattacattattgtgggatataaaccatttttagatgagcttaaaacatttcctgcataccttttatgtaactgcattatttttggtgatgcagatgacaccaagtatattacagtacattccctgcctctcaaagaattttgcctatgtgaggtcaatacaggtattaaaccagctcatacaacccctgcaaaaattaatgaggctattgcttacacatgaaaatttattatgtgctcattcttattgagagaatttcttatcactatataggatatagtgtggtttttaaktaatyacaatactattgttatagattcatagcataattctgtgatgatgtatcacatgggaaatacataagaaggtccagatttattctcttaaaaatgattcacttgggcttgcatctgtctatggcagactagcttgtatcttacttaccgtttcatggagaacattgaaaaggtaggtaaaatacataaagcacttgtttgaaggctttggagagctaacaaagcaacaaggatttaagggaccaagatcaaagatggaaaagaagtgcaggaaaaaaaagtgcagtgaagtaagcttgacatttggtttcctttcctcttaaggtatttgttaatttgtaagcactggtccagaagctgagtggtgtttacagcagtctcatgagtctgaagggacaaaaattggaattcaaggtctgctaagaagcagagcctctagttatactcaaggctttcagttgaaatccttaaagggccatgcctaggaataagggcaaacatgaaataaacttgctttcacaatacaggaaacayaactttgcctctgctcagtctcagattggattaaggtgatctctttctacgccatctgtcagaagcaaacaaaattttctttggtggaaaatagaaactcaaatgattctagacctttttatatggaaatgttcagcattcaacaataaatgaccaggcacctaacacattaagaccttatgactgaaaatcaagagggagaaaaaaccccctacaaactgacagtagaaacaaacctaatggaggcttaaataatggaactgtcagatacaggttttaaaatgactgattaataggtttgagaaaatagatgggctgggcgcggtggctcacgcctgtaatcccagcactttgggaggctgaggygggcggatcacgaggtcaggagatcaagaccatcctggctaacacggtgaaaccccgtctctactaaaaatacaaaaaaaaaattagccgggcgtggtggcgggcgcctgtagtcccagctactcaggaggctgaggcaggagaatggcgtgaacccgggaggcggagcttgcagtgagccgagatcgcrccactgcactccagcctgggcgacagagcgagactccgtctcaaaaaaaaaaaaaaaaaaaaaaaagaaaatagatgactgcttgaagaatttagtaagagaactttaagctatagaaaaagagttgaatggacataactagaaaatgtaacaactgaaattagaatttaatagatggcttttaaaggaggttaacatggctgaagagaagattagtgaattggaagatagaacaatagatgttatcaagactacttcatctgatgagtcatagtgaaaaattagaatacatacaaggaaatccaatgagaaattacacatgcaataatagatggaagaatcatagacatgataattggaaagaggctttaaaataaacatacatatttaaagagatgcaaaaaaggaatattattaagacaataggatatgaggagaaaaacaggtagatttgaaaaataaccaaataatattttctagaaacaaaaattacaatctgtgaaataaaaagtcaacagatatagtgacccagtcgatgttttcrygcaatatgtcaaatacagctgaagagagaattagtgaattggagataggtctgaggaaatccccaggatatagtactttgattagattgtgttaatcgaaaatgtctgattaactttggtatcaggtttaaactttactcaaaaatttaaaaacataattatagcctgatatttgatgacttatggaaatgatgcatctcttaatattttatgaagttgatactttggataattggatattattggacttcataaacattaatagaacagcacgtagaacagagtctcgcacattatagatactcaatatttgttgaatgagtggaatgaatgaatgaaatgtaagaataaaatcatagctacaaccttttgatttcagaatggggcagaggctgctcggattcacatatctgatactaagytcctatttttcattttaatttatggatatttattttagaggtcaacccaataatctagcaaaatatcactattaatatgtcttgcttaagaaatattggcttctgaataactacagatacacatgtataaatgaggtagttttttagatgtctatatatagatataattatctatatatcaaattatatctctagctaaattagttaattttcctccatggttctgggagaattgaacaaaggtattgtgctaagtttacattcaaaggcagcttgcacattttagacttgtcagtattaagaatgtggtgaggttttaaattgtagatctatttataagagatttatagcagttactataaaggatattattagaaagcaggtatgagctattaacaaatgaattttacttattttgcttaaaacaaaaagtgaaggacacaacccaaatttaaaatttaaaattattcttaacttctaaagtttttttwatcattgatttcctaagtgttgtagtaggtgaattttgttggtgataaactggtgattcaattctctgcacttgctcttttctctgagcaggtgcgggcattctatgtgaacgtgctgaatgaggaacagaggaaacgtctgtgtgagaacattgccggccacctgaaggatgcacaaattttcatccagaagaaagcggtgagtctttgtaagctgaagggtgtcctctgctggctaaggaagacagtgcagctgtgtgggagaaccctaaaaagaaagtgccatttctgttttacttgacttaagagaacttaaaaaaaaaaaaataaactagtaatccccaaccaacttctgattattttctttccatgttttatctggtctggcatatccatcgtccttagctgtttgtccagtgtgtactaatttagttgtgttcagactgaattttgtcctattctgtttaattcagctgcagccaagttctgtgcaagatagtaaatgtgcaatatcaaaatgtgagtcctgctgcaattctacttaaactttggatgataataaatatatcagccggtgtgatggcatgcacctgtagtcctagctacttaggaggttgagatgggaggatcgcttgagcccaggaatacagggccagcctggacaacatagggagaccctgtctctaaaatcagtcaatcagtcaatcagtctgtctttcttttttgcatttttatggtttaaaacctgcctaaaggcttaatgtcataatacctcgatcctccttcagatgcaractagaaatttgcatgatttctggaataagaactgcaatgcttccaaaaggcaggctagactttcatgctaaggtgctggggtatttctgatggccgctcatcgagctgmgtgaagccctctcacttctggtttcctggcctgtcccagagctaagctttttgcaaatctagaaatccccctttttccttggcccctagttgctgcttctcagttcctaggggcagctgggctagcagctgtctgggctgtgtcccagagcctgggttccagtatcagcagagagcttgacaggcgctctgtgtggtaggcagggcaggatttatctccttttactggagagaatggatacgacagcttgtaaatagcagaactgggctggaacccttggcattctcctttcacatatgctgaaactgtaaggcttttatgggttcccaatgccctgcctcctcttgctgtccactggggaattcctgcctgaagtgtgtggagttgtgctgcatgtaccagtgttcttgtatccttcacattaactttaggctgtgtctgggcccgtttctcaatgtaaatcactgtaatttgttaagcgcttactctgaggtcagctcttttcatgcagtaaatgcacctcacttctcagcatttttctcacagcatcctgtgaggtaggttgtgtgggttttttttttttaagatggagtcttgttctgtcacccaggctggactgcagtggcatgatctcggctcactgcaacctctgcctcctgggttcaaragattttcctgcctcagcctccccagtagcttggactacaggcatgccccaccatgcccgactaatttttgtgtttttagtagagatggggttttgccatgttaaccaggctggtcttgaactactgacctcaggtgatccacccatcttggcctcccaaagtgctgggatttcgggcgtgagccactgcgcctggcctaggttgtatgggtttttttccccgacaataagcaattctgtaattctttgacagtaactgtgtgtcctataactcaattcaattctaacagtagctcctggagctagagtcagaacccaaagatttaggggtcatttcccactttagataacaaatgaggtaccctrgctatgcacacttctgcagattctgactgcaaatcaaaccctttcctcaggtttgataatttgctggaaagactcatagaactcaggaaaatgatttacttatgattaccaatttattataaagaatacaactcaggaatagacaaatggaagaggggcatgggggaaggcctcggagcttctgtgcctccctgagtggaccacccttctagctcctggatgtgtgcactaatccagacactccctgaccttgccagttgygggtttttctggaggttttatgacataggcatgattgatgaaattattggctatgggtgattgaatacaatctccagcccctctcccatccctggaggtttgggggtggggctagaagttctaaccttctgatcgcgtgcttgttcttcctggtgtgagcctccatcaggaatctatgtaggcccccatgaatcatcttagtagtatataaaagacagtacattcgaagggttttagatctgtgtcaggaatgggggacaaagaccaaatagtatttttaaaattatactgattaggtgtcattttcttgcgcatttcggcagagggacataagctcagtaagttaagtgacctatccgaggttgctcagccagtatatgtcagagtgttcactggacctgcatcttaactctgaggctggcattgttaaacacctgtagtactgcctcctgctgaaacgtctttcctcccctatggaataaacactgggaaaccacagtcmctggggagtgatatagtagggagttagagtaatgcttgcatttattttcctttggccttaggtcaagaacttcactgaggtccaccctgactacgggagccayatccaggctcttctggacaagtacaatgctgagaagcctaaggtaagctgggagcagcctggccatgcagaggctgtgtgtgctgggttggagtaggcatgacttagttaccacttagcattacagtctgcaggggccattacctgccactgttagatttcttaggcagctgtgcagaaattcatttgagagataaagaaytcactggcaaaacacatactcttcattttagcgctgggcaatttaagacagttaaagtgaatgaattctgaattattattttcatttgcatacatattaaaactgagtaaatatcacgttgctgcccatgaggtgattaacctgctcatcttgttcttttaaaacagaatgcgattcacacctttgtgcagtccggatctcacttggcggcaagggagaaggcaaatctgtgaggccrgggccctgcacctgtgcagcgaagcttagcgttcatccgtgtaacccgctcatcactggatgaagattctcctgtgctagatgtgcaaatgcaagctagtggcttcaaaatagagaatcccactttctatagcagattgtgtaacaattttaatgctatttccmcaggggaaaatgaaggttaggatttaacagtcatttaaaaaaaaaatttgttttgacggatgattggattattcatttaaaatgattagaaggcaagtttctagctagaaatatgattttatttgayaaaatttgttgaaattatgtatgtttacatatcmcctcatggcctattatattaaaatatggctataaatatataaaaagaaaagataaagatgatctactcagaaatttttatttttctaaggttctcataggaaaagtacatttaatacagcagtgtcatcagaagrtaacttgagcmccgtcatggcttaatgtttattcctgataataattgatcaaattcatttttttcactggagttacatyaatgttaattcagcactgatttcacaacagatcaatttgtaattgcttacatttttacaataaataatctgtacgtaaraacagagatggtattttctttctttcgactccatatgtaactgtaaactgctaccagactcttaatttgaacatcatcattttcagatgtttacccttaaaaatggaaatgccagtatctcgaggactccatgttatttgtttaaatctatagcctttggacagccttctgagacactgataaaatagcaaatgccctaactttgaaaattacttaaatctcttgtccatttgctcacttacctgtgattgactttttaaaacaagggctcagaaccactggtcactttcctcttccttctttttaaagcccatatttgcctatcatggttgaaaatcacatggaagactttaaagatgagttctgaatactaaatgaaaatttgttttccttgaaaatctttattccgttcatattcaaaaccagtttgtgccgggtgtggtggctcatatgcctgtaaacccagcactttgggaagccaaggcaggaggatcacttgaactcaggagtttgagaccagccggggcaacatggcgaagccctgtctgtacaaaaaatacaaaaattagccgagtatggtaacgcatgcctgtagtcccagttactagggaggctgaggcgggaggatctcttgagcccaggaggttgaggctgcagtgagtcgtgattgcaccactgcactccagtctgggcaacagagtgagaccttgtctgaaaacaacaacaataacaactaaaaacaaaaaaccaaaccagtttatactttcaggagttcctgagttacgggcttcaggaaacagaccactagcagacagatacaaactcattcttggtcttttagctcaaatttctttactcctctgtcaaaccctcctgcctaattccccccgtatttgagtatgctttgagactgttatatttgtagacatagaaaatagatatatcgggctgggtgcagtggctcacgcctgtaaacccagcactttgggaggccaaggcgggtggaacacctgaggtcaggagtttgagatcagcctggccaacgtggtgaaaccccatttctactaaaaatacaaaaattagctgggtgtggtggcatgtgcgtgtaatcccagctactcgtgaggctgaggtgggagaatcgcttgaacccaggaggtggaggttgcagtgagccaagattgcgccactgcactttttattgggaaaggtgagaacttctggagatggttggtggtgatggttgcacaacagtgtgaatgtatttaatgctactgaactgtacacctaaaaatggctaaatggtaagttttgtgtatattttaccccacaaaaaaatccaatggtccattcttagtccttgtcttacatgacctctcagcggtgtttgacacagttggtcgttcacactgccttcttcattgtttatttattttagagacggcatatcattatgttgcccagggtggcctctgcctcctgagtaactgggactacaggcacacatcaccatgcccagctttcctcctcgtccctttctcctcctcctcatttttcttcctcctcctcctctctcttcttcttgtccttgccctcatcctcctcctttttttttcttccttcttccttttttcttctctctcttttttaaaataagagctttattgagatataattcacataccgtaaaaaccacccatttaaagtgtacgagtaaattttttttgtatattcacagaattgcgcaaccatcaccacaatcaattttggagcattttcatcaccccaaagggaaacctgtacctatcagcagccactctccatttctttcttaacctagtccccagccctaggccatcatgaatctaagatttgcctactctgcatgtttcatttaaatggaataatatagtatgtggtcttttgtgactggcttctttcacttagcataatattttcaagattcttacatattgtagcatctatgagtgcttcatttttttaattgccaaataatattccattttatggatttactatgttttatttatccgtttatcatttgatggacatttggattgtttctactttttggctattatgaatagtgctggtatgaacatttctgtacatatttttgtgtggacataacattttcatttcttgcattctcatcttaaaaggtgtttttctggctgggtgcggtggctgccacctgtaatgccagcactttggaaggctgaggcgggcggatcacgaggtcaagagttcaagagcagcctggccactatggtgaaaccccatctctaataaaaatacaaaaaaaaattagctgggcgtggtggcaggcgccagtaatcccagccagtcaggaggctgaggcaggaaaattgcttgaacctgggaggcggaggttgcagtgagccgattgcgccactgcactccagcctgggtgacagagcgagactccgtctcaaaaaaaaaaaaaggtgtttttcacctacactctgccacaccactatctaaaaatgtaaatattagactcttaatatataaaaatctgttcttttgctgtgtcaagccccttgacataagtaactccatcttagagactccatcttatatttcatagggcactttgcgaacagggacaagatgtttgcttaataaataaagactgcatccaaccagatgaggacatcaacaagcacacttttccactctcagtcctcactagaggactgtggctataaaaagaacaggacttgcgcagcttgaaatggccgtcttaactacaccatcttgctgttaatcatgataatcacctggcatctgccactgaaggctctcggactgcctggcgcagaccaggagattctttttgccttagtcgctctccctgaattgattcattaaccctttcttcctatccttcttcttttgatgttcaatattactttgttgtggcatgtttaatctataacatttatattttaagtatactattatgtatgatctgccacattgactgacttgtggagtggcttgagcctgtgtgactgcagctctgactatcgagcaaatgggaagcactgaggcaaactgcctccttaggaactccgtgcagctcgtggcttttgtgattgagattacttcaagaaagtcagacattgtggaaagacacaaatgtgcatggacctgatcatctctgacctcacgctgctcatgagacttgctcttctaaaaggagggcttggtctgggcttttagaagcactgtgaaggattgcctagtttgtttcaaataaatgtcaggattttggtttaaaaacacattaattcggccaggcacggtggttcatgcctgtaagcccagcactttgggaggctgaggaggggagatcatttgaggtcaggagtttgagaccagcctgaccaacatggtgaaaccccatctttactaaaaatacaaaaaattagctgggtgcggtggtacacacctgtagtcccacctactcaggagactgaggcaggagaattgcttgaacccaggagggagaggttgcagtgagccaagattgtgccactgcacaccagcctgggcaacagagtgagactcaatcacaaaaaacaaaaacaagaccaaccacattaatgttttctttcctgggtaaagggcatcactctgatttgtgatttgtactatggaagtgttttaagaacttcttagcactcatttttctgggagaaaagccacaagcaagctacttgggccatttctttgcctcttagttcgtggcattaccaaagggcaaagagccaaattccactttaaactctctggtaagccaaactgaaggccttaacgtttttttttaaatcagtgcttttaaagatgtgaggggttagtggaagtcaacttaaaaagttctgtataattcgttttttttttttttttttttttttttaaggtggattctcactctcctgcccaggctggagtgcagtggcatgatcttgggctcactgcaacctccacctctgtaatcgcttgaatcgagttcaagtgactctcgtgtctcagcccccgagtagctgggattacagatgcaccccaccatgtccagctaatttttgtatttttagtagagacagagtttcaccatgttggccaggctggcctcgaattcctgacctcaagtgatctgcccgccttggcctttcgaagtactgggattgacaggtgtgagccactgcacgtggccagctctgtataattttgaacctctgaaaaatgtaaacaatcacatattaatatatgggaagtttgctatggaaagttctattgcagatccttttaacaaagcaagtacttattccctcatttgactatttgataactgaattttgcattatctattgctttaattttttgttgttttgctttggtattgtttgctcaaagtgtaatattttatttatttttttgagacagcgtctcactctgtcactcagacttgagtgcagtggcaccatcacagcttactgcagcctcaaccttctgggctcaagcgatcctcccgcctcagcctccctagtagctgggactataggtgcacacccccacgcccagccaatttttgtaatttttgtagagatggggtttcatcatgttggccaggcaagtctcgaactcttaagctcaagcgatctgcctgtctttccctcccaaagttctgggattacaggtgtgtgccacggtgctgggccaagtgtggcattttaaacagtcccttgtattttctgtccttcaatgaattgtattatggagctatatgtttaagtaaaactcttactttaaagagtgtggtgaattggacagtgatcccccaaaagatatatccatgttctaatccttggaacctgtgagtgtgactcatttggaaaaaggatctttgcaatgtcataagttacagatcaagaggaaactgggcgtggtggctcacgcctgtaatcctagcactttgggaggcctgggcaggcgaatcacctgaggtcaggagtttgaaatcagcctggccaacatagtggaaccccatctctactaaaaaatacaaaaaattagccaggcatggtggtgtgtgcctgtagtctcaggtagggaggctgaggcaggacaatcacttgaatccgggaggcagaggttgccgtgagccaagattgcaccactgcactccagcctgggtgataagagcaaaactttgtgtcaaaaaaaaaaaaaaagatcaagaggaagttatcctgattactcaggtggggcctaaatcaaataataagtgtccttctaagagaccaaaggggagaagaaggagcaggttatgtggagaccgaggcagagattggagttttgcagccacaagccacaaaatgcctggagtcaccagaagaggaagaagaagggaaggattctttcttcttctttttttttcttttttcttttcttttctttctttctttttcttttttttggaaggattctttcttagagcctatggcttccttgatttcagacttgttgcctccagaagggtgaaagaagatatttctgttgtttgaagccaccaattttgataatttgtcacaggcaaccctagaaagctaatgcaaagaggatgctagtttaatggttttataaaatgaaaatttcttgagtagcaagaagaacgaatgtttttgttctctgaactgcttggtgcccagggagtgggagggaaagcatccacatccagacagtgtgtttctctgcagtcctgcccacttctgcctgtttgtcccaccccagtccctgccatgctcctgagatgcttggctctgctttattgtcactgccaagctcttgcctgaaaactccctatttccctcctgttagctaatttctcttctcctggacagtctttcctttcatcctgactgtggtccattaacatggtacttacatcttcaggtgg

SEQ ID NO: 95301 - DNA, 55119 bp, Homo sapiens
  misc_feature (1)...(55119): n = A,T,C or G
tgattctatttctctttgcagattggccttcttctctttctctacaggcagcaaagaatatgccatctacagccttgcttagcaacctcaggagaaagggagctcttctttctctagagtccatagtgcaatcccagagaagcgttgattagctgtgctagggctccatgcccatccctgtatccagagggacatgttctacaacttcgtgcaaattaaaaacaacacatttttgaggaggacagtagagtatgctgggcaaactaaataaataaaaataaataaaccaaagtccactgcaggttacaaagccgtgcttcctttattaccttggagtgctgctttgaaatgttggtgtaaggaacagcatttatagcagccaatgacccatctataatggcaggtcctccttagtctcctggagacagagactggtgcatcaaagggacttctggctagtttctttcttttctttcttcctttccttcctttcattctctctttgttttctttttctttttcttttttttttttttgagatggagtctcactctcttgcccaggctggagtgcagtggagtgattttggctcactgcaacctctgcctcctgggttcaagcagttctcctgcctcagcctcctgagtagctgggattacaggcatgcgccaccacacccagctcattttttgtatttttagtagagatagggtttcattgtgttggccaggctggtctcgaactcctaacctcaggtgatccacccgccttggcatcccaaagtgtagggattacaggcatgagccaccgtgcccaggcctctttcttttcctccctccctccctccattctttctgtctctctctctccttccttccctccctccctctctctttctctttctctctctctttctttctctttcttctctctttctttctttcccctccctccctccgttctttctctctctctttccttccttccctccctccctttctttctctttctctttttttctctttcttctctttctctctctttctttctttctttctttctttctttctttctttcttttccctccttccttccctcccttccttccctccttctctctctttctctctctctctccctttctttcattttgatacaatgtctcactgtcacccaggctggagtatagtggcatgctcacagctcactgcagccttgacctcctggactcaagtgattctcccacctcagcctcctagtaactgggaatacaagcacacaccaccatgcctggctatttatttatttttttaatttcttgtagacacagggtcttatcatgttgtccaggctggtcttaaactcctgggctcaagcaatcctcccaccctcggcctcccaagtgctgggactacaggcataagccactgtgcccagccttgggtagtttcttatgacaattgttttcctccacgaggtcaagcacctagtttgtatattcactgctgtacccgcatggacttagcacaatgtctggcatatagtacgtactcaaaaatatttgttgagtgaatgtaaggatttgcagcacagttgactcaaaggcatattgacaataactgagcatatactaaatgtgtcagaaactaaggatgcaaagatttttttaaaaaagcaaacctgctccctgcctatgacagcccaccagaggaggcagttacttaagtaagtcattgatataaaatcatacacataataaatgaagcttgaacaaagtgctacaaaaatggtcacatgatctctaagatgatggagtaagtccaaaagagttcaaatgttttcagggttttgatatttagccatgttctttttttttttttttttttgagaaggagtttcactcttgttgcctaggctggagtgcaatggaatgatcttggttcactgtatcctctgcctactgggttcaaacgattctcctgcctcagcctcccaaatagctgggattacaggcatgcgccaccatggccggctaattttttatttttagtagaaaaggtttcaccatgttggtcaggatggtcttgaactcctgacctcaggtgatccacctgactcagcctcccaaagtgctgtgattacaggcgtgaaccatggcgcctggcctagcaacattcttaaaatcagatatgtacatatagaaaagtctaggccgggtgtgatggctgacacctgtaatcccagcatcttgggagactgaggtgggaggattttgtgagcccaggacttacagaccagcctgagcaacacagtgagactctatctctacaaaaaaattaaaaattagccacatgtggtggtgcattcctgtggtcccagctattcgggaggctgaggtgggaggatcgcttgagcacaggaggtggaggctacagtaagctgtgatcatgccaccgcactccagcctgggccacagagtgagaccctggctccaaaaaacaaaacagaacaaaacaaaaaacccaataacgattgatgaggattgtagtgagttggaaacggcatgccctaaataaaggtggcttatttatttatttatgagacagagtctcactctgtcgtccaggctagagtgcagtggtaatcataggtcactgcagccttgaactcctgggctcaaggtatcctccggcctcagcctcccaagtagctgggattacaggtgcatcccagcacacctggctaatttttgtatttttagtagagacggggtttcaccatgttggccaggcatgtgtcaaactcctggcctcaaagtgatccacccacctctgcctcccaaggtgctgggattataggcatgagccgccacctccagcctatttatttatttatttttgagatggagtttttgctctgttgcccaggctggagtgcagtggcatgacctcggctcactacaacctctgcctcctgggttcaaccgatcctcctgcctcagccccccgagtagctgggattacaggcaccccccaccatgcctggctaatttttatatttttaatagagacagggtttcaccatgttgcccaggctggtctcgagctcctgacctcaagtgatctgcctgccttggcctcccaaaatgttgggattacaggcatgagccattgcacctggccaaaggcagcttatgctgtgcatatccagtcagttgttaccatctaggaataaatcatgttaccaaattttcaaatttttcaagtgaagctggaaatgtagttctttgttggcagaaatatcctaatttttaagtgttggcaaacaccatgcaaagcaaataaaatatatctaatgagccgcatttagtttagattgcaacttcagtttgcaacttctggcttagaaattcatcccttttggtccccagcacctagaacagtgccttaaatatagcaggagcttagcacagtgttactgaataaatgaatcaatggcttgaaagtcttaccaatttacagtaaaattgttatttaggattttgtaaaattactttcctctttccattcattaagtgttcctactcaggattttaaggttgaatactagtttattccacacagaccctttgtcaaaccttatttatggtatacacatatgcaaaaatatcctaaagagctgggagattgtaagtatgctttttcattaatagagtgaggcataaaaataaaccgaggcaaagaaagaggttaagtgagtattaaattcctggcaaaagccagcttctcctttcacaaataaaagatagttatataataattatgtatggtaactaaaacatacagagttctcaagataggaaagcttgtattacaagatatcaatgtcttcttttttgatagcatcatttagcttatacatatctgccttcttttttgtttttgtgaactaataatgcatattcattcattattcattaaacaaatagcgattgagaaaacaaaaaccaggcatgaggctgcatgcagtggcccatgcctttaatcgtagcaatttgggaggctgaggcaggaggatcacttgagtccaggagttcgagaccagcctggacaacatcgcaagacctcgtgtctacaaaaaataaaaaaattagccatgcatccaggcgcagtggctcaggcctgtaatcccagcacttttggaggcggagatgggcgggtcacctgaggtcaggagttcaaccagttcaagaccagccgggccaacatggtgaaaccccatctctacaaacaatacaaaaattagccgggcgtggtggtgcgtgcctgtagttccagctactcgggaggctgaggcaggagaattgcttgaacccgggaggtagagattgtagtgagccgaaatcgagcgactgtactccagactgggcgacagagcaagactccgtatcgggaaaaaaaaaaaaaaaaattagccatgcatggtggcacaagcctgtagtctcaactactcgtgaggctgaggtgggaggattgcttgagcctggcattcctgagggcgagggggtctcctgccctgctcatgtctaattacctactttaactggaggctgaggttgcagtgagccgtgagcgtgccactgcagtccagcctcggtagcagaatgagagagagagaaagtataatttaaacaaacataaaaatgggcacaaggcaggccgggcgcggtggctcacgcctgtaatcccagcactttgggaggccgaggcgggaggatcacgaggtcaggagattgagaccatcctggctaacacggtgacaccccgtctctactaaaaatacaaaaaattagccgggcgtggtggccgatgcctgtagtcccagctactcggtaggctgaagcaggagaatggcgtgaaccagggaggtagagcttgcagtgagcagagatcgcgccactgcactccagcctgggcgacagaggagactccgtctcaaaacaaaacaaaacaaaacaaaacaaaacaaaaggcacaaggcacagtgtgtgcatgtggatagccaaagttgaatggtatgtggtttttctttcaagggacataaagactaatagggataccagatcattaataataattcagggtatagagaactaagtgtcttgggagaggtacagatgaacggaaggggaattgtgaaaaatcaggttcaaaatgttggctggggattgcttttggagggctttgaaatgcagagtatagattttgtagtttattaggtaggaaactgactcagcacatggaggtgatgttgctaatgttctatttcacgtaaggatacacgaccactggcaacctgatctggctgtctgcaaatggcatttgtgaaacgctgaagaaaaatctcatgttcctatctttaaaaagacagagttaaactcctaaacatttgagtttaaaagtaacataataaatacatactttaagggtgcaaatttaatttcggtacttttaaacacaatcatttaaacattctatttgaactattttcaaattacatgaacaagccaggcgcgctgcctgtagtcccagcttctcgggaaggcgggaggatcgctcgagcccaggatttgggagggtgcagtgctctttgagggcgtctacgaataaccactgccctccagtcttggtaacatagcgagatatcgtctcaaacaacaacaacgacaaccaccaccaccaccaccaacaacaacaaccaacaacaaaaaaaccactttgggagctcctcagtcccttcagccccgaccccaagcatcgacttcccctcccatccggtccctgtccacgtagcctgggaacctgctcccactcggcaaaagtttctgtagggagtcagtcttttggtgcacccctccccgcactcttgtacattctgactggctgtcgctctcccatgtgctctgacagactgctctgattggttaacaaatgccgcgagcacgcggatgtctgtttcctgggatattgtgagggcgggcggagatgtagacccggtagtgttgtgccttgtggtgacaactggcggcagygcgccgcgggcccgagacttagtctcgggccgccatggccagcgtccacgagagcctctacttcaatcccatgatgaccaatggggttgtgcacgccaatgtgttcggcatcaaggactgggtgacgccgtacaagatcgcggtgctggtgctgctgaacgagatgagccgcacaggcgagggcgccgtcagcctcatggagcggcggaggctcaaccagctgctcctgcccctgctgcaggtgagaggckcccgctggctcctgctcgtgcagcaaacttttactgagcwtctgctctgtgcggaaccctgggcttggggacactcgtgtccatcagatactctccctgcctggaggaacgtgaagaaataaagatagctactaccggtagctaacacgtactgagcgtttacggtgggccaggcgctttacatgcattttttttttttgcaagttcatgtctggctccagtatttattagctgagagttagagtctcagatcctgtatcttctttaaaatggggctatacaatagagcgttggagacacagggataagtcatacaggctccctatcctagaggaccgtaataaacagtaaaaatgccataaaacctggccgggcgcagtggctcacgcctataatctccgcactttgggagggtaaggcgggtggatcacgaggtcaggagttcgagaccagcctgaccaacgtagtgaaaccccgtctctactaaaaacacaaaaaattagctggacgtggtggcgggcacctgtaatttcagctactcgggaggctgaggcaggagaatcgctagaacctgggaagcggaggttgcagtgagccgagatcgcgccactgcactccagcttgggcgacagtgcaagactccgtttcaaaaaaaaaaaaggcataaagccaaggacgagcactgattgaatacttaactgtgtgctaagcactttacttaaaatttgttttaaattattattatttttttgagacagggtctcgctttgtcgcccaggctggagtgcagtagtgtgatcgcggctcactgcagcctcgacctctcaggctcaggtgatcctcccacctcagcctcccaagtagctgggagtacaggcgcgggtcactacgcccagctaatttttttgcattttttgtagagacgggattttgccatgttacccaggctggccgggaactcctggactcaagcaatcctcccgtctggtctcccagagtattgggattacaggagtgagccactgcgcccggccgtcatgtgttatttcattttgcagacacaggtttagctcagataattaagttccttaattcatttgggtctcagttttctctctgtaaaatgggaacaatagtagaaactgttactagcatgtagtaaatgctcaatattactagaattttcattttagtgtgttcacatatggcatataccttcccctatatcagttgtggtttttccatttatattcatggttacgtgagtgatggccttctctcccattagacggtaacctccaccagctcagtacttagtcctgtttttgtttactggtacatccccaaagcctcctagaatgcctgagtagttttttgtaaaatgaatgaaatgcgatagaggtggatgagtgcactcatggagaggatttttttttttttttttgagacggagtctcgctctgtcgctcaggccagagtgcagtggcacgatcacggctcactgcaggctccgcctcccgggttcacgccattctcctgcctcagcctccggagtagctgggactataggctcccgccaccacgcccggctaatgttttgtatttttagtagagacggggtttcaccgtgttagccrggatggtctcgatctccagacctcgtgatctgtccgcctcggcctcccaaagtgctgggattacaggcgtgagccaccgcgcccggcccgaggatttcttacagaaagtgtgaagctgtgccttgatggataagcattgtctgttgagtaacagtgatggcagaaacagatctgggtycctgggcctcyatattatgggatcttaaaagataaacctaataaaattagtgtctagagttgcatttatattccttagtatagtttataaaggcttttttaaaaaatttatcacttgtatttgtgggtgaggggcatgggaagaggggagaactgaggacaccatggtcaagagacctacccagttaaataaaagggatgtctttataacttgtggctcccagggctagccacgtctgctattactataaatgcatttccctccattattaaagttataatactaaaattttggtaaataaaaggccgggtgggatcacacctgtaaccccggcactttgggaggctgaggtgggtggatcacttgaggtcaggagttcgagaccagcctggccaacacagtgaaaccccatctctactaaaaatacaaaaaaaaattagccgggcattgtgatgtgcgcctgtagtcccagctactcgggaggctgaggcaggaaatcatttgaacccaggaggtggaggttgcagtgagctgagatcacatcactgcactccagcctgggcatccgtctccaaaaaaaaaaaaaaaaatagaaacagtgattctggtctcttaactctcaccttcctgctcatgttgttttttgctgtttggaattctttctggtttttaacctggctaactactatatagttattttatttaattttttatttttaaatttattttttttttaatttttttagagtggtgggatctcactccctcagtcacctgggctggagtgccgtggtgcgatcctagcttaccatagcctccacctcccaggctcaagctgtcctcctacctcagtcttctaagtagctaggactacaggcacctgccaccatgcctggctaatttttaaattttggtagagatgtagtctccctatgttgctcaggctagtcttgaactcctgggctcaagggatccacctgcctcagcttcccaaagtgctggcattacaggcatgagccaccacacctggccccctactgtatagttttaatcaaaatgtatgtagagttcatctagtagcatcccagccagacctcaactcctttactaactgtttgatttcttaaattagttaatttttggctkggtgcctagactttgggaggccaacgtgggaggatcacttgagcctaggagttcaagagcagcctgggcatgggatttcaccatgttgtccaggctggtctcgaactcctgacctcaagtaatcyrcctgcttcagcctcccaaggcgctggtattacaggcgtgagccactgcgccaggccccraatggtctttttaatggctgcattatatttcacagtaagaaaagcaacataattcaactctgtattataaattaagtctttattggacttacaggctcctttcagtttttcttcatttcaaacaatgtatgccaaaataacttccctagaagtgcaattgctgggttatccacatctaaagttggcatatatgcagtcatcttattctctgaaaaagagtctaaatttagttttaaatctcaactagactgtaatcttcttggtagctgaggttgcatactctttattccttgtggtactctttttttttwattggagacggagtcttgctctgtcgcccaggctggagtgcaatggcgtgatcttggctcactgcaacctccacctgccaggttcaagccattctcccgcctcagcctcccaagtagctgggactacaggtgtgtgccaccatgcctggctaatttttgtgtttttagtagagacggggttttgccatgttggccaggctggtcttgaactcctggcttcaggtgatctgcccaccttggcctcccaaaatgttgggattataggcatgagccactgtgcccggcctctcgtcatactctttatagacttcagcacatagtatgtctgcctaccttacaaggtttgggagaagatcaaatgagattgtgtttgtgaaaaatagtatttgtatagtgttttccagtttacaaagcactttgtattatcttatttaatctttgccaaaaacaagggagatattattatctccattttactgatgaaggaaactagaactcagaggtcacaattttgcaatgattacaaagctaagaaggaaggaacagtggatcctcagactataaatcctatgctttttttctattttagaccattccactgactagacaaaaatggtatgcaaatgtgaagtattactttagtgttttaggtagatagaaaaatccttatttgcatktttggagtgattattaaagcagaggggttgataaatgaatttatgtttgcaattctttatcagtctccagctctttaaaatccatacctccctatctctcctttacacagggcccakatattacactgtcaaaactttacaagttaattgaagagtcttgtccacagctggcaaattcagtgcagatcaggtaaacttcattttcttctttatatatgaaaaggtgtgaaggtagatgaaaatcacaaaagggtatgtggtagttaattcttttaaaaagatacctttattaccctaggttgttttcccaagagcctttacttaattctgttttgttgaaaaatggatagctttttctttggagacagggtctcattctgttgcccaggctggagtacaatggtgcaatcagggctcaacgcagcctggacttcctgagctcaggtgatcttcccacctcagactcccaagtagctgggactacaagcatacaccaccaaacctggctaattttttgtatttttagtagagatgggattttgctttgttgcctaggctggtcttgaactcctgggctcaagcaatccctccgcttccacctcgcaaagtgctgggattacaagtgtgagcaaccgcacctggctgaaaaatgggtaacattaagcatactgttttatagcttttttccccaaattttattattccttatggatccatcttactctttttagtcattgcagataattgaatgtttattggttgatgtgatagtttgacaaattttatgatcaagaaaacaacaatgatacttttcagaaatacgggagtaacattttgaattatgaagtttgttttatgagccaccattttatacaaatctctgaattgcctgtaaaatacattatttgaggtaattgaggaatatgaaacatgagaaattattcaaagggcctttctaaaatatgcacctcgattttctcattcagaatcaaactgatggctgaaggcgagttgaaggatatggaacagttttttgatgacctttcagattctttctctggaactgaaccagaggttcacaaaacaagtgtagtaggtatgaaactcttctaagaagagcagagagtattttcattgaagtgagcagctttctaagtcatgtctatcattgttctgctatatctgtgaacagacacagtggggatgttggaggtgttgcagtttgtatttattgccttactgttttgatctatatttaaatcattaactgtggaaaagcaccttctgttttgtctacaatagtaagagtcagagcctggtcctggggtttttaggggttcccagctctttctcacagtcctctggatcacttgcctgcatggtccatctgtaagtgagggtcaccagcccagacttatgaagagaggtaagtaaaaatacattattgatatagtatgcaaagtgagggcatacgtggtgtttctttgatgcttttctattagctttatcccatgctctatccctctggcttttttgcatggtaatttttatgttattcagcgtgagctatttctctctctcttcctatgtgccaggctctggacgtgtaagatagacatggaatttcctcttatggagattacctctggttgggggagccagttggtaaaagtaaacacataaatatcatttcagatagtgtaacagccatgaagaaagtaaaatggaagccttcaggtggaggtggggtgggtagattgtgccctgtataagaagaaaccagctttgtaaaggactggggaagaacattccaggaggagggaatggcaactgcaagtgtctctttcttactcttctgaaggaagaattccagcagacagtcattgccattgtggagttgccattgcgtagcctggatgtcagttaatgctttccccttgtctctcgtcttattttgtaggtttgtttctgcgtcacatgatcttggcctacagtaagctttctttcagccaagtgtttaaactgtacactgcccttcagcagtacttccagaatggtgagaaaaagacagtggaggatgctgatatggaactgaccagtagagatgagggtgaaagaaaaatggaaaaagaagaacttgatgtatctgtaaggtaatttggcttttctgacagggatccttttcctgtgaaatagtataatttcaagtgcaataagtccttgttcatttagaattcacgtgctggcttatgccctttttacccttccagatctgggaagttaactgataagggctgcaccagtgggtcccttgccctctgacttgtgattggccaaygggaggcactggcaggaaatcccaagggccagggagaatgacgtggagtgtggattcattggctccctttcttgggggtcctggggggctggctgtagggtcacagcttctgtcaggtcgctctttctgcactccttcagggggttcggtgactaggagcaagtgtttgcaggccccaggtgaaaggtaccccactgttatcagtcctggggactgtattgtgtcttatgacttcgctgtcctttcccctacttttgtcaattgatcctttgttaaactcttctcagactactcaatttgaatgtgttctttgttttctgctgggtccctgactggtattgttcatcacatcagagtgaagtaacacttgattaattcagtgaaaatttattgaatgccttctaaggtctagcctctaaggaagctgttgtaaggaagttactcacttagttggtcaagcccaaaatgcagtagtatccttgattcctccctgtccttcaccccagtccctcagcagatccagtcagtccttcctccctgctatgtttggaacttgttcacttatctcatagccactgctacccctggagtctaagcacccaatctctaccaaatctactcaccaaatctgcactagcatcacttttctccttgacttaactcctgtctccctacatctgttcttcaggcagcatctggggaagcccctaagaatattaatcagatcccagcacttttctgcctaaaccctttggaacttagagaggagtttgagcttaccatggcctcagtgcctgtataacctggcccaatgaacttccctgacctctttctctttattttctccttcactctcagcatagtgactgctctgactttatccttcagtttcttgactactccaatcagtttctacctcaggttgcctagaatgctcttccctggcttttcacctcatgtgctccctttcacctttcagatcacagctcaactttcctcagacgggcctccctgaccacgaggtagcgcctatcccaaatactttctttttctttcttttttttttttttttgagatcaagtctcactgtcacccagcctggagtgcaatggcacaatcttgactcactgcaacctccacctcctgggttcaagtgattctcctgcctccacctcccaaccaagtagctgggattacaggtgcccaccagcacacccgctaatatttttgtatttttagtagagatggggtttcactgtgttggccaggctggtctcaaattcctgacctcaggtgatccacccgccttggcctcccaaagtgctgggattacaggcgtgagccaccgcactcggccccaaatactttctatttctttattcctccatacctctcattactaagtaaccttcttaatttacttgcttgcttgcttatctgtttcccctgcctcttcaccccttgagaactgagacccttctctgtcttgtttgatcacatttccccagtgtttagtagagtgcctgactcatagaatgtgttctgtacctgaatgttggatgaatcaatatatagtccatcacccatactggtaactggcccagtaacacactttgtattaactgtccttccttttgctgttttacttctccttccctaactactgttatctgagattgcttccaaataaactacttgtacttgcaggcaaaaagatatgtatgtatttcatattccctgatgtcaaagagcctgtgatctggtgaggaaggctgacaagtaaacagatacactgtccagagctctgagagaattaagccccacctgccctaaggaggtggtcaagggaccttatcatttcctgggagcttattatttactgcattgcaggctgttaggctactgtaatccccagggtggcagggggtgacattgtttataaatggggaatgcttatcgcactttctatgagtagtttttgtactgttaaatgatttgttcagcacatattgagagcaagaggataatagtaccattaactgctccccaaaactcatttccttacaaatgcttcttgtctggtggaaagacaacatagtgtggagttaagagtctggctctgcagtcagatccccaggttggcctgctgctcctctgcctttggtctctgagaccttgggcaagttattcaccctttctgtgctttgagctctttatctgcaaaatggggctcataccccttccccagagggttgtcagaattaaatgataaattcatataaagtattcagaactgtgcctagaaatgttaactattattattctctactttctcttttagttagttgccctcagaaatgcttctaggctacagtgtaatcctttttctagctactttatatgcttaaagtagcaaagtgtcacttctgcagaaatgttaaaattcagacttttcttatttgggttggttttctcttaacttgatttatttaggtctaactccatctttttgtttttatcttattctaagaagtcatttatgtataatccaatatattttctataaaggtatatggtttcagaaaatcatgcatatttagtaaactgaatttcatcgtgaaaattgaagaaatgtattctttatatttaaatctaactaatgattataattctttgtctaaaagaaattactttgttagagaacctttttattttataggatgtacttacatgtatttcttagttcttttttaaaggaaaatttcaattgttttctttttgtgatcttttctttttgagatgaagtctcgctctgccgccaggctggagtgcagtggcgtgatcttggctcgctgcaacctccacctcccgggatcaaacaatttttctgcctcagcctcctgagtagctgggactacaggcacgcactaccacacttggctaattttttgtattttagtagagacaggttttcaccatgttggtcaggatggtcttgatctcttgaccttgtgatccacctgccttggcctcccaaagtgctgggattacaggtgtgagccaccgcgcttggcctcctcgatgttttcttctaagagtttttaattttttttatttaaaaatgtattatttattttttattactagcaggtggaaggaagatcttctaagagttttacggtttttggcctcacattgaggtctttgagtccttggcctcacattgaggtctttgagtccttgtgagttaatttttgaatatggtgttagataaggatccaccttcatgcttttgcatgtggatgtgcagttttcccagcatcattggttggaaaggctgtcctttccctatcaaatggtcttggcactgttgccaaaaaccatttgaccatgcatgccagggcttctttatgggctctgtgcattgatctcaacatcactttttatgtttttctttcctagttctgaggagagagttaaattttttgaactctttcgatacaagaatccatctgattttataaatgttatcatttttacttttgtgtaattctttactatttttgtttttttattttttccagagaagaggaggtatcttgcagtgggcctctgtcccaaaaacaagcagaattttttctttctcaacaggtatgtgaattctgtaatttatcatgaacttctgttctagtcctgtgatgtgtctagtcctgtgatgtgtgttgtggcataggcccgttatgtgcataggtttgttggtcagtctgtgtcagcctttactcttggtcccctctgcctcactaacgaagcacttgtagctctgtgccccttcctattttgtgtgtgattttatttttctattaaagttataatccaggtttcatttagtaatggtatgtgactaacagcctaaaaccctgtgatttaacccttctctcaacattttattatagacatttgcaaacataaagagagcctgaaaagcagtgtatggtaattacccatacctattacctcgattctacaattaatatttttgttctatttattacttatctaaccactctctattcagccaccatttcatcttattttttgatatatatttccagttgcagatattaatacactttgctccaaacacttctctctttttttgttgtttttgagacagagtcttactctgttgcccaggctagagcattgcccaggctggagtgcagtggcatgatctcgggtccctgctacctctgcctcctgggttaaagctattcttatgcatcagactcccaaatagctgggattacaggcgtgcaccaccacacttggctaatttttgtatctttagtagagatggggtttcaccacattggccaggctggtcttgaactctcgatctaaggtgatccacctgccttggcttcccaaagtgctgggattacagacatgaaccagcgtgccccaaacatttcttttttgtttcttttttttgagacggagtctcactctgtcactgaggctggagtgcagtggcataatctcagctcaccgacacctctgcctcccgaagtgctgggattacaggtgtgagccaccacgcccagcccaaacatttcttatggatgcttttcagccatattttttcattttcttggacacataatctgaacatttttctgtgttattttcagcatagaatttttagtttttgctctatttttctacttttccctaattttgttatgagctttctgcagaaagatgtaatgtttatatctagacaaaagtgatggaggctgggcatggtggctcacgcctgtaatcccagcactttgggaggctgaggcaggcggatcacaaggtcaggtgtttgagagcagcctgaccaacatggtgaaaccctgtttctgctaaaaaaaacacacacacaaaaattagccgggtgtggtgatgcccgtctgtaatcccagctactcgggaggctgaggcaggagaatcgcttgaacccgggaggtggaggttgcggtgagcggaggttgcagtgagccaagattgcgctactgcactctggcctgggtgacaaagtgagactccgtctcaaaaaaaaaaaaaaaaatttacggaattacctctgcagatgaatttcaaacagattagaaaaacctgtctatgtgattggttaactgtaaggaaaaagtacagctggatccttccttaccttaccttgtacctcagtatattacagatggattacagggttaaatgtaaatatttacagctttagttagataattaggctagaatgagctacacattgttggttttttttttttttttgagatggagttttgcttttgttgcccaggctggagtgcggtggtgatctcacggaataggaggaggggagcggggtggcggaaaatacatcgaggactgaaaggaggaagatggagcataggccgggttaagggtggaaggctaagggtgaacggagagaggcttagtacaaggagagggtgcggtaagaggtcatactggtgtgacgaaaaaaacagcgtatgtaaactagaacgtgaaggagcaggagattcaacggtagtgagagggagaggagattagaggggtgaggcgagcgtgtggaaggggagtgggacacattaagttaagcggattaagtggtagagcagaagggttgcaaagcattaggaggatagtcgaaaaatgttctcggacaaatacggggaagaataagagagtaagaaggaaaagnnnnnnnnnnnnnnnnnnnntatggaatacttcagagctgaggcaggaggaatcgcttgaacctggggagtggaggttacagtgagctgagatcacaccactgcactccagcctgggccacaagaacgacactccatctgggaaaaaaaaaaaaaaaaaaaaaaaactggaagaaaacatgtaggagaagataatttgattttcagaataaaaattgaaagcatctccatgtcaggacttgttttaacataattaacaggcaaacaggatgggcgtggcagctcacgcctgtaatcccagcaatctggaaggccaaggcgggtggatcatttgaggtcaggagttcgagaccagcctgaccaacatggtgaaaccccrtctctattaaaacacaaaaactagctgatgtggtggcatgtgcctgtcgtcccagctacttgggaggctgaagcagaagaatcgcttgaacccatgrggcggagtttgcagtgagccaagatttcgccactgtacttcagcttgtgcgacagagcgagactccttctcaaaaagaaataaaattaaaaaattaaaaggcaaataacaaaggtgttcttgggctccaatactttgggaaaaagtatttacaataaatatgacagtgaaagtttagattttggttttggtttagaaatcacattttcaggccgggcacagtggctcatgcctataatcccagcactttgggaggcagaggcaggtggatcacctgaggtcaggagtttgagaccaccctggccaacatggagaagcactgtctctactgaaaatacaaaaaattagccagatgtgatggtggatgcttgtaatcccagctacttgggattcaagaagaatcacttgaacctgagaggtggaggttgcagtgagccaagattgtgccactgcactccagccttggcgacagagcaagactctgtctcaaaaaaaaaaaaaaaaaagaaaaaaaagtcatatttgatgatgagacaaagtttacaatataaaatgaaaagaacaggaaataaagttacatatcatattctgattttgttaaaaatataatgtgtatatacacattatataaatttggaatacaccctgtattataaacatatattgtgattttgttaaaaatgtaatgtatacacaatatatgtttacaatacagggtatattgtaaatttatataatatgtatacacatatttttaacaaaatcagaatatgatatgtaacatatatacacacatacagaacaaagactaggataatatacactaaagtattaatagcgttatttctgggtagtgagattgcagaagatttttgttttcttctgtaggttttctatatttttggaataatttttccccatactacacctacataataatttgttttttgttttgttttgttttgtttttttgagactgagtcttgccctgtcacccaggctggagtgcagtggcgtgatttcggctcactgtaatctctgcctcccgagttcaagtgattctcctgcctcagcctcccgagtagctaggattacaggtgtgcgccaccacacccggctaatgttttgtatctttagtagagacagggtttcactatgttggccaggctggtctccaactcctgacctcatgatctgccctcctcggcctcccaaagtgctgggattacaggtgtgagccaccacgcctggccaataattttctataatgacataaattaacaatggaattagaaattatttttactttaaaaaaattttttttaaagaaattattatttttaaatagagatgaggtctcagtatattgcccaggttgttcttgaactcctgggctcaagcgatactcatgcctcagcctctgcctcccaaagtgctgggattacaggcatcaaccaccacaccctgcccttagaaattattttacttatagaaaaactcatctaggtaaaattggagttaagtgtctataacccagttaaatgtaaacatttaatttgtagctaactttctacatattttatataattgttgctgatatcgtccatatgaaacaaataagtagagctggggcaagccacctggctcccataaggccccatacaggcactggaaatacaagaagcaaacacattacctgcctggaaggagcttacagtctggggtggggtcagattggcaattttactatagtttgatagtgccacaggrggggtaagtgcagagggcttatgggagcatggaggggcttataggatctcaccttcatctagaaggtgacagaagcaggtggcccagaggatgagctaggcatgggcgtcggtttgctcagctttgggtagtatatggctggggagcgatgggtgggaggcttggtgtttctggaagaggaaacagtgttgtagatggtcaagaggagakcatgtggcagggtccaccttcagtgttacctagagtgagggaaggccagccaaggctggcgagatgaggggccagagcctgaagggacccctgtagaaaagaaaataatcaggtgatgctagttagtatatcttttcatatgtttattgaccctttctttctactgagttaccatttttaaatttcaggcttctttgctaaagaatgatgagactaaggccctcactccagcttccttgcagaaggaattaaacaatttgttgaaatttaatcctgattttgctgaagcggtaagtctttcccagaatttgttgctgtgttggaaaggaatgacaaggcaactttttttgtttgtttgtttttggaaacagagtcttactctgttgccaggctggagtgcagtggcacgaccttggctcactgcaacctccgactccctggttcaagtgattctcctgcctcagcctcccaggtagctgggattacaggcacgtgccaccacgcccagctaatttttgtatttttagtagagatggggtttcaccatgttggccaggatggtcttgatctcctgacctcatgatctgcccgcgtcggcctcccaaagtgttgggattacaggcgtgagccactgcgcctggccaaggctrctttttatattgagtagctgtgcaaatgagaatcagcccattggcccaggttcttgaaggaaatcgtgttcttggtaggcaaacaactcggtataggttgcaaagctcctccctccctcctcgggccataggcgatttcttcttactcttgatgttctctttcagtcatcatcctcctgatgttgtaaagtttggactggagataatatactagactgatgsaaaaaacagtgtttgtttgtttgttttggagactgagtttcgctcttgttgcccaggctggcgtgcagtggtgcgatcttggctcactgcaacctctgcctcccgggttctcagtgattctcctgcctcagcctctcgagtagctgggagtacaggcacacgccacaatgctcagctaattttttgtatttttagtagagacggggtttcaccatgttggccaggctggtctcgaactcctgacctcaggtgatccaccctcctcrgcctcccaaagtgctgggattacaggcatgagccatcacgcccagcctaaatgacagttttgaggctgaaaaactcttttcctttctcttcttttgtcagtgtttatttttaaagttctaataattccattccttaatggattttttactcggaaaattttcttaaatagtatttggattttccatctgactttgggtgcagaaatatatctattttgcttcctagtaactgagatctgcctgttagggaagtttcagtgattaaaaaaaaaatgaaaataattaacttagtaaactagtaagtctcagtgtgttttaacttgtacattaataaaacttaattttataatttgtatatgaattcaggttttaggatctttaattctgaacactcagttttcctcaatatttgaactaggtaaggcccmgtattctcatctatcactcatgtaaccagtggcatagtggagtatatttgagataaaactgacacaaatactaatggaactcccatttttaatttgtggactccctctagggggaatgtgtcttgaagctgttttattctgcctctagggagaagattaagctaaactatgaccatcttattagaagggtatgggatacactagtgtttgtagacagtggaactstctgcagttgtcttacaccagagatatttacagcgtttaaratacattgattatttcttgttttagcattatctcagctacttaaacaacctccgtgtccaagaygttttcagttcaacacacagtctcctccattattttgatcgtctgattcttaccggagccgaaagcaaaagtaatggggaagagggctatggccggagcttgagatacgccgctctgaatcttgccgccctgcactgccgcttcggtcactagtaagtttatagacctttgtccttgcgcaaattgaaggaaccgatgacaataaaaagtctgctgtttggcctggtgcggtggctcacgcctatagtcccagcactttgggaggccaaggygggtggatcacgtgaggtcaggagttcaagaccagcctggccaaaatggtgaaaccccatctctactaaaaatacaaaaattagccaggtgtggtggcaggcacctgtagtcccagctactcaggagactgaggcaggagaatcgcttgaacccgggaggtggaggttgcagtgagccgagagcacgccattgcactccagcctgggcaacaagagtgaaactccgtctcaaaaaaaaagaaaaaawaaataaagatttgctattttgggagaaaagaaaagggaaaagaaatggaagaaatgaattctcaaatgttaattgtgatgcatttttwaaaaatgtatttttwaaaaagaagataggaaagcagctcatcaacctggactagtcagtaacttccatagagggaaccttattggcactggaacagtttatgaaaaccttctgcctaaatagtctgccccctagtgtcactatgtaacattgccgtcttagtgcctagcctctttcattacttctaagaacaacaggccgttcagtgaaaaagaaattaggtcattaggccagagagtccctaaaggattttttggaggtaaaaatggggatgcagaagctatttttagtatttcaaaaagccagaaggcagttgtacctttactggatgaaagactacataggcttactraaagtcaggtttgctttcaggtagaattcaggctgctcagtcaggtgacactggtttatactgttgcctcagtgtgcctctgtttttaatgaatagaaataggaaaatcgatcaattatgttttagtaaatagaattaagtagataaaacaactttcaaaacatggaggctatcttggaaataatgaaataatgtaaataatggtgaaaggtgggaaattactaattcaaagatcccttcacccccccacctgccctgtggctttttaccagttgagagaagtgtggtctttgctacaggcatccttctatacagactatagcgtgtattaatgggagcatagtgttcacagttcaataatggagacatctatccctttctctgtgtcaggcagcacctagggaattctttttatctctggttgtcaggtttttgtttttgtttttaagagacaaggtctcactcagtcacccaggctggagtgcagtagtatgatcatagctaactgtaacctcaaactcatgggctcaagcaagcagtccatctcagcctcctagctgtgactacaggcatgcaccacaatgcccagctaatttttttaaaaattattttttgtagaggtaggatcttgctttgttacccaggctggtttcaaactcctggcttccagcaatcctcccaccttggccttccaaagtgctgggattacaagcatgagccactgggccaacccagttgtgaggctttaaaagggatgtagacaagctgaagcttgtgtggggagggaacagtctcagggtgttgagacattcaaagccatatcatataagtaatgtgggagggatgtgagacatgtttagcctggaaaaaaatgacttatccaagcatgtgtttgacatcttcatgtagtgaaaagtcatgtgaaaagagcttagattgattgagggtatggctacrggagaagattgagagctggtaagtaagtgtaggttaaaggacaaaatatttctgctcattataaggaaacagtttccccttattgaaccctctgaggaaggtgtcagtgaggtgctgaggcctagaccaaagatgttattaagggtattcaaacatcagattgatagttgtacccaaaaatatttaaggctcctcaaaactccatgatttttgcaacattccatgatatcttgtaataactaacttcttttggtcttcccacatttaataacctctckatcagagcctttctttttttatgtactcaaaaataatagaaatgccatttttaatatttaccaataacctatttaacttagtaaggaactgcttcccctgggggttagaaatttgtacacagccttctggatacaaataatctttatttaattaattaatttatttgttttttgagatggagtcttgctctgttgcccaggctggagtgcagtggctcgatctcgactcactgccatctcgccacctgggttcaggtaaaaaattctcctgtctcagcttcccgagtagctgggactacaggtgcatgccaccatgcccaactaatttttgtatttttagtagagatgggatttcaccatatyggtcaggatggtctcgaactcctgacctcaggtgatccacctgcctcggcctcccaaagtgctgggattacaggcgtgagccactgcgcccggccacaaataatattttgatgaacagaatttcttctttttatttttaaaaatatagagacarggttttgstrtgttgcccaggttgttcttgaacgcctggtctcrrgtgatcctcccaccttggcctcccaargtgctgggattataggcataagctactgcacccatctcagaatttgtctatgtttacaatattatcaatgggtagacagctaattgcacagaatataaatgaggagaggtagatttttattaatgtgtacattttccttaattcctgatttactcaggcccaggcttctttgtttctggtcttggatctatgggcctgtgtaaatctttgtcacttagctaaaaggatttcttgaaaatccttgtagttgtttattgagcatttactgtgtactaggcactrttgtaggtactagggatacagcagtgaaaaagaaaaaaaaaaaacttgttatagagcttatatcaggggaaatagggaataaacaacgctaagcatagttgtamtatctcagatagtgatagaccaggataagaggttagaaagtgaaggtgaagtgctcttgttttcctgagtaacactcttactccagatacatatacaggtcactcaactccttcaatttgtaaatctctggttaaatagaaaggtagcagatcagccctccttgatctctgccaacttaatatttgaacagagatttaaaggaaaaaatattacagaagtgggaatcctcaaaatactttctaaaactagctttgggctgggcaccatagctcatgcctataatcccagcactttgggaggccaaagaaggaggatcgcttgaggccaggagttggagaccagcctggggaacacagtgagactttatctccttaaaaaaattagctgggcatggtggtatgagcctgtagtcccagttacttgggaggctgaggcaggaggatcgcctgaggccagaagtttaccagcctggggaacatagtgagactctatatctatttttaaaaaaattagccgaccaagcatggtggtgagtgccttagtcccagctactcaggaggctgaggtccatcgcctgagtccaggaattcaaggctgcagtgagctaggattgtgccactgtactccaacctgggtgacagagggagaccctgtctctaaaaaamaaacaaacaaacataaaagtgattttgaaaaaatgataaaagtaacaaatgcacatagtaagaaaaaaggtcaaataatgtaggagagaatgccatgaaaagtaaaatattatatcctctccttgcccttcccctcagcagtggacctttaaaataaacatcttagaagcggagataaaagcctttgctttatgcccttttcgtagcaattccccttagaagagacatgtcctatatttccactgtcagtgttttctgctgctagggttggggcacgcctctgagagaataagcccagaaatagttacagcttccaacccagagacctgcatttggatgactgtgtacagatgacttcctgctatggttgcttatgcatgtttgtgattrttaatgggatattaatgtttagtctgtcattagtcaacaggcagagctcgccctgcaggaggcaattaggattgcccaggagtccaacgatcacgtgtgtctccagcactgtttggtgaggccatcctctggtcttgggagttttgttcacgggttgaattggccttcacaaggccccgttgaattgggttgttttgcagttggagcagagatcttcagcagcaaaaggaaacaagttaggtggtcatgggaattcagaaagggcaacttatctttacttacctttcttaattcatgacatctgttttgcttttggcatatatctgctctacaaagtttaatgcaacttgccatgaaagaagagaaacctttatcacatttagcactggcattaacaaaagatgtatactacacttagtaactgggtgagatgttgtcctgtaatagcaaaatcaccagggcagtggaacacagaagctacttgacaagcacctgagaatcttatttctcaattgaaggccatatgggagcttcatgctttttttctgaaacacctgccactcagtggctgtcaggtgaagcagaacaatgactcatttatttcagcctggttttaatgatgttgatatgtttgacaggtctcattgagattcttgatatttcttgaaagagtatttgagaggattcattttgtcccttttaaattctttcttatgaccacattgatatttcactagaacatcagccattgccactgttatgatatattttgatgatttctcttgccagagctggctttatgtgctggggcagaagagatccgatagctatgttctgctggagcattctgtgaagaaggcagtacattttgggttaccggtaaggctcatctttctgtgagattgtttccataaatggtcgagcctttgtctctttttctgcccacctctgtcattaaccagcgatagatttagaatgggtttcaaagtgtggttttattcttggcagtttcatatractttaattattaatcagaccactaaattctgtgtggtaggtttctctctgttccctgtatcctaataacatctgtggaaattccctttaccaatttgataagagatcattgtttagtttattgagcaacattaatttagcacatagtcacttagaaaaattttagcaaaggcttatttttaaaccagggattggtgaactttcccgcccttgggccaaatctggctttctgcctacttaggggcttcaggctgagtggattttacatttttaagtgattgcagaaaaaaaaaatcaacaacagagaagaaatacgtgacagaaaccaagtgtggcctgaaaaatcgaaattatttactctctggccctttacacaacaagtttgctgatccttgttttaaacaataaacaaagccaggaaccagtaaacctgacaggcagatttgtcctttctcgttttgagtgatagggaaggccgtgaattatagtcctcaatgacatacacagaggggcattgaaaaggcttatctggctgggcgtggtggctcacacctgtaatcccagcactttgggaggccggggtgggtggatcacctgaggtcaggagttcgtgactagcctggccaacatggtgaaaccctctctctactaaaaatacaaaattagctgggtgtggtgggacatgcctgtgatcccagctacttaggaggctgaggcaggagagtcgcttgaacctgggaggtggagattgcagtgarccgagattgtgccattgcactccagcctgggacaacaagaatgaaattccatctcaaaaaaaaaaaaaaaggaagcacaagcttggagaaccttattctctctcagaaacacccattgaaaactagaccataggcagtgggattgcttaagcattctgtcttatgaagtttgtgacagacttcagtaaaatggaaagtaattacaggtagtaatttaatgtatacactttaaaatcggcctggcgtggtggctcacacctataatcccagcactttgggaggccaaggcgggtggatcgtgaggtcaggagtttgagaccagcctgaccgttatggtaaaagctcgtctctactaaaaatacaaacattagccgggcgtggtggtgggcgcctgtagtcccagctactctggaggctgaggcagaagaattgcttgaacctgggaggcggagtttgcagtgagccgagattgctgcactgcactccagcmtgggcgacagagcaagactccgtctcaaaaacaaccctaaaaccaaaaaacaaatctgtagcttgtccattgattcacacctgggaaagaaamtcatacgtacagaattgattataatgacaaaagtggctccttgaagtaagcgcaggcttaactacaatttttgccatgaatttaagctggcattttttagttgagctttcatccttgaagatgacaccaaaagctaatgacaagataattttgttgctcatgataggcatccttttttgatctcctattacatatgtgcgcagcactgtttgacatctattatttcattgtaatccttacgataattctttatgataggtttgatgcccattttacagatgaggaagctgaggcttagctaagaagctaagtgactggccctaagtcacacagtaagtagcagaggcagtgtttaagtccaggtccatctaatgctaaagccctgctggctctttcccgtgtaccctctgcctctctcccagacccagtttttcaggaacacatctcgtatggctcagggttaaggccaggttatargtactttccttttaaatagtgctgtcactgtgcatgtgctgaaatgtgaaatccaccacatttctgaagagcaaaacaaattctgtcatgtaatctctatcttgggtcgtgggtatatctgtccccttagtacctcgcctccctgggaatacagtcccttgttcaacagagagcttttgctgggaagacggcaaacaagctgatggatgccctaaaggactccgacctcctgcactggaaacacagcctgtcagagctcatcgatatcagcatcgcacagaaaacggccatctggaggctgtatggccgcaggtaggtctcccaaggccctgggggtgtgaattctttagagagaagcaggagctagcaagctggttctgtgaaaggccatacatacaagatttacctgccttggatagatgttgttcctgcaggggactatgttttagactataaaacattttgtattttgcacagactgaaaacttttttcccatgcatgttccttcttactcctcccaaccactttgtgaggtaatgggtgggtgatctccatgctgggagagtaaaccagggttcacacatctgatctacccgcgatcgcaaacgcagttaacaagtgacagagaaaggactcaaacccacgtcatctgactccaagcaccgggctcctctgctctgtgacaggaaccttcctgtttataggaggcatgatccatggttgctctagttgagtgtcacctgaaccccaaaactattgtgtaaaagaaagttgcttttctgttaactgaggtgttttctgtggaatattttcatcttattgtgtactttcacatttagccacttttagcctggaagtaaactttgttgccgcattttaatcctggagttctgtcgctacctcacccctcacttagacagtctgtttctaggaattcagtaatgaaaggaagtgccttttttaccagtcttgtttttgtatttcagataattttttggcacggtgtgctctgaaacagctgcagacactggccactgcttacattgccagagcagtctgtgccaggatggcatcgggtctgaattcacccgtgaaaactaattaacatactatgactgcagggaacatggggtgggggcggggggatctgggagcgtgtactcccagctgtgccctaaccactacgtgtctcctcgcgctgcacatccaggatgcttttctgcctttcttatcctgagggcaaggttgctggcactgggaggcatctgctcccaagaaagccagagcctgtgaggtgtatgactttacgcctccactcaagatagctgaygggcatggccaaagcgcagccaggtctgctgctgaaaggaaatcctgttccctctccccacccagcaccatggcactgcaacaggcccagatgttgctgagcatgaacagcctggaggcggtgaatgcgggcgtgcagcagaacaacacagagtcctttgctgtcgcactctgccayctcgcagagctacacgcggagcaggtaggcaggtggccgggcccacgtgcttctggagcaatggaggctctaccatttctttcctctaatgcttgaggaaagcactggacacgtgttggacaggtctgctcgacactgtggctgaaagagtgaaatcccaccagtggaaggggaccaagggtggagtctgcaaagttggttgaatttgaggtctttttttggcatcaatgaagggaattctaagaggtcagccagtttcatgtaactaaggaaataaataggattctttgacatttaaggtagcagaggtttgtgtgttttaggagagaggagagtataatagaagtatatctgaaatcataataactaatgttggttgtaaatttgttctgtgccagtccctgtgcctattttatgggtactgtctcatagaatccacttcatgggctcaggtttgttgttatccctatttcacagaactaaagactgaggtcctgggagctaaatcctgtatccaacacctgtaaatgtcagaggcaggtctccaaccgaaacctggttgactccaaagaagagcagtgggaatgggacataatcttgatgacttacagctcaagtaatttgacgagattctctttataagggatcaattaaagtatctcttctgctactgtaggctttatcttccctttattcaaaatatcttctttcatgggaaagagtcagggaaaactattttatctaaagccctccatctcrgtaaacactgctgtggcaatccagatgtttccttgatcatatttttctcttcctctttgtgatacctgttactgttagattgcatcataacactcaacattccctaattgcagcctaaagatttttgggtggtttccactcctttcagaagtctagacatacttccctatagcaaacatgttagcattttacagtctcttacatggctgtgtaaactgaggggtggatgggccctgactgatgggttccacggcgcctttgccagctggtttcttcccatgtctgggaagcaccgcccatgttttctgaggtcgaaagggctagctggttgcttcccctgggaatgttgcaagtctgtctctcgcttgtttcttccctcttcgtggcactggcacctccttaacatcacttctcttcctttcctggtgccttggataagagaagcatctggtaatgaatgagtcggtgaacatattgaagtatttagtttttttgaaacggagtgtcgctctgtcgcccagtctggagtgcagtggcacgatctcagctcactgcaacctctgcctctggggttcaagcaattcttgtttctcagcctcccgaatagctgggactataggtgtccaccaccatgcccagctaatttttgtatttttagtagagatgaggtttcaccatgttggccaggatagtcttgaactcctggcctcaggtgatccgcctgcctcagcctcccaaagtgctaggattatagatgtgagccaccatgcctggcgaaattatttttttttactattagaatagaaaactacttttcaaaaaccttagtcttggttcaattctttttttwtttttaatttttaatttttaatttatttttaatttaattttatttttttgagagggagtctcactctgtcacccaggctggagtgcaatggtgtgatctcagctcactgcaacctctgcctcctgggttcaagcgattctcctacctcagcctcccaggtagctgggattacaggtgtgtgccactactcccagctaatttttatgttttttgtagagatggggtcttaccatgttggccaagctggtctgaaactcctgacctcaaatgatccacctgccttggcctcccagagtgttgggattataggcgttagccaccgcgcccagccaatttttaattttttttgagacagggtctcgctgtatcaccagggctggaatgtagtggtgcaatcacagcaaactgcagcctcaaccttctgggctcaagtgatcctcccacctcagcctcctgagtagctgagactataggagcgtgctaccacacagctaattaaaatatctttttgtagagatggaatctcactctgttgcccaggctagtctcaaatttctgggctcaagcagtcctcccacttcagtgtcacagtgttgggattaccacacccagcgtattttttatttttttaagagatggggtctcactgttgcccaggatggagtgcggtggcacaatcatagctcactgcagccttgaactccacctcaacctgcctagtagctgggactacaggtgcacaccacctcatccagctaattattttaattcttgtttcttagagatggaatctttctatgttgtgttgcccaggctgatcttgaactcctggcctcaagtgatcttcctgccttggcctcccaaagtgttggaattacaggtgtgagtcacagtgccttgtggctcaattctttagccttgtaactttgttcaaggccatttgttagaattttgtgtcttttttttctgggagtaagaccctaaaaagtaaccatgctctttgggtctatattaataattccatcttcatctccctttcacctctgggcttatgtgaaaaacctgctgacccaatcattgtttggcttcaacagccaggctgtgttaggaagccttttagtacacaactagaaggtagctgccttttttttttaagtcagtcctttacccctttcttcatcttgccttagatctttctagttttagaacatcaaccgtgtggatatatatatacttactgggctgatgactgtcacatttttaattagacaagttagactcatacttgtgaaattaagtttggccagctgcagagaaggcagctttatcatgagtctccagttactcttttctttctcttgtatctgcttctgaaactttccttcaagtaaattggatggtgcacgttgttttgtggtatgagagtgattggggtttcggtaagcccataaataagttatggggctcagaactgctttctgagcttcctcttgcaacccagaggaggtagagtgaattctttttctaatataaccattytcctttgctctttccatgtaattctagctcatcttatatcactcctctctcagtctcaggaattgcaggccacgatgggaatatttttgggggatactgcaggatctatatccccatgcccgactccctgtggcggtcatgaaaataattggtgagactggccagttaaaatcacaggaataatgatcttttattgtaattctatgtaatttctgcttattcacttcaaataaaagtccacatgtggcctgagcgtctatgtagacaaaaagtgcattacctcatgaaaggattgagacaaattgaaagtatttcgggatcaataagataaacctcccagttgggtgctgtttatctttatacttgtaatcccagcactttgggaggctgaagcaggcgtatcacttgagctcaggagtttgagaccagcctatgcaacatggtgaaaccccgtctctacaaaatatacaaaaattagctgggtgtggtgtgtggtggcacatgcctgtagttccagctactagggaggctgaggtgggaggattgcttgaacctaggaggtagaggttgcaatgagctgagattgcaccactacactccagcctgggcagtagagcaaaaccttgtctcaaaaaaaaaagataaacatcccgacaatataagagtataaaaaagtcatgaatgtacattcacagaaagcatggcccaaaaacatgaaaacatttcaatctagtcattgaaattaaatttaaagcagttaaggtactactttcaccaattatataagcaaagatacttcagtgttagaggaagaaaagcacagagttctggtatgaaagtacttggtacatttatatagggtaatttagtaatatatctcaaagaacttaaaagtgcctgtcatttccacttctaaggttttttgtttgtttgtttgtttttgtttttgagatggagttttgctctggggccaaggctggagtgcagtggtgtgatctcagctcactgcaacctctgcctcctgggttcaagcgattctcctgcctttgcctcctgagtagctgggattacaggcacctgccactgcgcccggcttatttttttgtacttttagtcgagatggggtttcaccatgttggccaggctggtctcaaacttctagcctcaagtgatctgccctccttggcctcccagagtgctgggattacaggcgtgagctaccgcacccagcctacttctaaggttttatgctaaggaaataattggaccagtatgcaaagctctatgcaccaagatattcattgtagcattttttaaatggaaaatattagaaataaccaaaatatcaaaaaccagattattttcatgtaccataattgattttcccgataaaatactacgatgatataaatttgtatttattgacattgaaagatttattcattcaacaaatattcattggatgcctaccatgtggtaaacagtgttataagtaatttataaaaatatatgtaagctggacacggtggctcatgcctgtaatcccagcaatttggggggctgaggtgggcagatcacctgaggtcaggagttggagaccagactgaccaacatggtgaaaccctgtctctactaaaaatacaaaaactagctgggtgtggtggtgtctgcctgtaatcccagctacttgggaggctgaggcaagagaattgcttgaacctgggaggtggaggttgcagtgagcctagaccacaccactgcactccagcctgggtgacacagtgagactccctctcaaaaaaaaaaacaggccaggtgcggtggctcacgcctgtaatcccagcactttgggagaccgaggcaggcggatcacgaggtcatgagatcgagagcagcctgaccaacatggtgaaaccctgtctctactaaaaatacaaaaaaattagccggacatggtggcaggcacctgtggtcccagctactcaggaggctgaggcaggagaatggcgtgaacccgggaagcggagcttgcaatgagccgagatcgcgccactgcactccagcagggctacagagcgagactctgtcccaaaaaaaaaaaagaaagaaaagaaatttgagtctctgaccagtatctctcaggttgctgcatcaagaacgggaacaggtgaatctgtcaccatctgtgcatggtacagcaggtgtggattcaacacaggttatgctgatcaarttgtgtgtttctactttagggctgttttgctgcagcttctgaagtgttaaagcacttgaaggaacgatttccgcctaatagtcagcacgcccaggtaatctgccttttgcatggcaatagatttatttctgataaaaatagcttttattataatataaagtgggacataatctcccctcagaaaaataatattgagctaaaaaggaacttgtcaaaggatgcttacaagtatgatattatttatataaagtttaaaaacacaggctcatactctatgttgtttagagacaagggtatatgttgtaaaagtataaaaaacmtgaatgagaatgataaataccaaattgagtgcctactttgaaaaaagagaaagagacgtagaatttgcaaaggacttcattggtatctaatagtatatgaagcagataaagcaaaatgtgagttgacaaagttgatgattggcacacatgtatctgctattttattctctgtgctttttcacatacttgagatattttaaaaaawttttaaatccccccaaaaaagaatatgtgtgaattattgtaaggatatttgctaagcaatccaaaatactttcatatactcattaagatgaacattygccattttgtacttaattgtgtttttttttcttactagttatggatgctatgtgatcaaaaaatacagtttgacagagcaatgaatgatggcaaatatcatttggctgattcacttgttacaggaatcacagctctcaatagcatagagggtgtttataggtaagaaaccttgaaaactctaaccccagaataaaataattgttaaatggttttgtttttgttttatatgtgcattaatttattttagcttagaaaaaaactttattttcttaataaataagaaaatacaggtaagcagctgggcatggtgacttacacctgtaactgggcatggtgacttacacctgtaatcccagcactttgggaggctgaggcgggcgcatcacttgaagtcaggagtttgagaccagcctggccaacatggtgaaaccctctctctactaaaagtacaaaaaattagccaggcatggtggtgggtgcctgtaatcccagctacttgggaggctgagggaggagaattgcttgaacccatgaggcggaggttgcagtgagccaagatcgcaccattgcctccagcccaggcaacagagtgagactccatctccaaaaaaaaaaaaagaaaatacagataagcaaaatgaagaaaataagtatctcccagagataatcattaacatgctgttatctataattccagaatttttcctgcatgcgtgtgtgtgtgtgtgtgtgtgtgtgtktttgtgtatacacagcatgctcacatacatgctcacacacacattcatacacacatacaatttattctttcaacaacaaaaacattttttttttttgaggcagagtctcactctgtcgcccaggctggagtgcagtggcacgatctcagctcactgcaatctctgcctcctgggttcaagcgattctcctgcctcagccttctgagtagctgggattacaggtgcccaccactaygcccagctaattttttgtatttttagtagaggcagggtttcmccatgttggccaggctggtctcgagctcctaaccttgtgattcgcccgcctcggcctcccaaagtgctgggattacaggtgtgagccaccgcgctcagcctctttcaacaaaaattaaatcaggcacagttttttcccttgggaggtttatagcgcaattgaataaattgagattcttaccctcaaagtgactagttaaaacacttgtgttcattttgattctgtttcaggaaagcggttgtattacaagctcagaaccaaatgtcagaggcacataagcttttacaaaaattgttggttcattgtcagaaactgaagaacacagaaatggtgatcaggtaaggggtctcttgtacatctcacggagatgtggtggtggatcttctcatcctgtgttttcctctttayggtcagtgtcctactgtccgtggcagagctgtactggcgatcttcctcccctaccatcgcgctgcccatgctcctgcaggctctggccctctccaaggagtaccggttacagtacttggcctctgaaacagtgctgaacttggcttttgcgcaggtaagccgatctctgtttttatagcacatatttgtgctcaagagctggtgagtctgtgactacgtttgagtattgaaaggataataatgagttttcatttgttcatattgacgtctggaaaggtagtcttcctgtgcaagccctccaaggaggcctgtggaggtgtgaacctggtgacaaactgacactttccagtggcactggctttcytgagctgtgtattcagtaaggaggactcgcctcttcagtgagaacacctgcatcatattaatgattagctgacacagagtgatgcttgatttagcaacaaggggatgtgaataaagaaatgaggaacacagatgttcatygaaagcttttggaaatcaaattgtattttatgtttgttttctttctcccccagtaaaggccatgaaggaattgactcttcattttcatctatattccctagtaccttataggccctacacatagaaggctttcaataaatattaatcaatgaatgagtgaaggtcaaaygcactggaagaatttattaattaaagtggaggttctccaaactggctgtacattagaattattgcggagatttaaaaaatatcttcgtacctgaggccttgcctcagacctacggagtcagaatctctaggggtggagctaaggaatctgtttcttactaccttcctcagtgattctttttttttttcttgagataaaatgtacatggccaggtgtggtggctcatgcctataatcccagcactttgggaggctgaggtgggcagatcacaaggtcaggagttcgagaccagcctggccagcatggtgaaaccccatctctattaaaaatacaaaaattagccgggcgtggtggcacgtgcctgtaatcccagccactcgggaggctgaggcaggagaatcgcttgaccctgggaggcggaggttgcagtgagccaggatcgtgacaccgtactcccagcctgggcaacagagcgagactccatctcaaaaaaaaaaaaaaaaagtatgtaacacaagatttaccactttaaccattttaaagtgtacatttcagtggttttgagaatattgacaacattgtgcaaccattactgctatctaatttcagagtattttcattacatagaaaaggaaactgtacccattaagcagtcattccccagtcctcccttcccccagcctctggtaacctctcaccggtttctgtctctatgagtttgcctattctgaacagtttgcataactggactcatataaatgtggccttttttgattggcttcttttacttagcttgatgttttcaggttttatccatgtagcaataggtatcagtgcttcattstttttcatggctgaagaatatttcactgtatggttagatcacattttgcttatccattcatcagctgatgggcatttgagtcgtttccaccttttggctgttatgaatagcggctctttacatttctgtacagcttttgtttgaacacctgttttctttttttttttttttttttttttttgagacagagtctcgctctgtcacccaggctggagtgcagtggtgcaatctcggctcactgcaagctccgcctcccgggttcatgccattctcctgcctcagccttccgagtaggtgggactacaggcgcccgccaccacgcccagctatttttttgtatttttagtagagatggggtttcactgtgttagccagggtggtctcgatctcctgacctcgtgatccgcccacctcggcctcccaaagtgctgggattacaggcgtgagccaccgcgcccgggsttgaatacctgttttcatttgatgcctacgaacggaattgctgagtcatgataattttgtgtttaacttcttaaggaaatgccacagtggctgcaccattttgtttcaacctgcaatgtatgagggttccaatttctccacaatcttgcccacccttgttattttccatttttaattattacatccttcctagtgggtatgaaggggtgtctcattgtggttttgatatgcacttctctaatgactaatgatgttgagtatcttttcatgtgcttattggccatttgcatatgttctttggagaaacgtctattccgatcctttacctgttttttaactaagttgtttatctttttgatgttcacttgtaaaaattatttatatattgtggatactagacccttatcagatatataatttacaaatattttctcctgttctgtgtttggtcttttcactttcttgttagtgtcttttgatatacaaaagtttaaaatttttatgaagtccaatttatttttcttttgttgcttgtgcttttrgtatcatgtctaagatactgacaaatctaatgtcatgaagattttcttctatgttttcttctcacagtattatagttttaatgcttatgtttaagtctgaataattttgagttaatttttgtatatactatgagatagggctccactcttattcttctgcatacggatataggttattctagcaccatttgttgaagactcctctttccccatttaatggttttggtacccctgttaaaaaccagttgatcaaagaaaaaaaagaaaacaactgatcgtagatatataggtttattttcggactctcaattctattcccttgatctatatgttacccttatgccagtactactttgttttgattactatagctttgtagtaagttttgaaatcaggaagtgggagttctttgttctttttcaggattgttttggctattcagcatcccttgcaattatatgttgattttagaattagcttgttcatttctgcaaaaacagtagttgtaattttgatagggattgtatttgaatctgtaggtcagtttggagaacattgccatcttaatgctattctcttccaacccatgaacacaggatgtctttccttttatttggatctttaacttacttcaacmatgttttgtagctttctgtatataaatctttcacttctttggttaaatttatccctaagtattttattctttttgatggtaatttaaatgaaatttttttaaacatttatttttgggttgctagtttatattgatcttatatcctgcaactttgccaaacttattacctgtaacaggttttggggattttttttttatggttttgtatgtataagatcatgtcatctgcaaatagagatagttttacctcttccattcccacttagatgccctgtatttctttttcttgcttaaatgctttgagtaaaacttccaatacatgttgaataaatgtgacaaaagtgtgtgtcttggctcggtgtctcacacctgtaatcccagcactttttgaggccaaggcagattacttaaggccaggagttcgagaccagcctggacaacatggtgaaaccccgtctctactaaaaatagaaaaattagctgagtgtagtggtggtggtgcatgcctgtaatcccagctactaggtaggctgaggactgagaatcacttgaactcagtcctcaggagctggaggttgtagtgaaccgagatcatgccactgcactacaggttgggcaacagcaagactccctctcaaaaaaaaaaaaagtgtrtgtccttattttgttcctgtagggggaaagcgttcagtctttcatcatcaaatatcatgctagctgtgggttttttatagaggttgaggaagttccctctattcctagtttatttagtgtttttttcatgaaaaggtattggattttgtcaaattttttttttctgcattgattgatttgatcatatgggtttttgtttgtttgtttttgagatagagtgtcactctgttgcccaggctggaatgcagtggtgcagtcttggctcactgcaacttctgtctcccaggctgtctcccaggttcaagcagttcttgtgcctcagcttcccaagtagctgggatcacaggtgtgcaccaccatgcccaagtaatttttgtattttagtagagacagggttttgccatgttggtcaggctggtctctaactcctggcctcatgatccacccacctctgcctcccaaggtactgggattacaggcgtgagccactgcgcccagccccgattttttctttcattttatttatatatttgtgtattgaactaccttgcattcctggagtaaatttcacatggtcatagtgtatgttccttttaacgtgctattggatttggtttgcaagtattttgttgagaatttttgcatctgtattcataaaggatgttgatctgtggttttcttgtgatatctttctttggctttagtattagggtaatagtggccccacaaaatgagttagaaagtattctctcttctcctttttctgggaagaatttgagaaggattggtgttaattgttttaaagtttggtaaaattcaccagtgaagcagtctggccctgggcttttctttgttggaagtttttttggttactaattcagtctctttagttgttataggtctattcagatttcctgtttcttgagtcaattttagtagtttggtctttctaggaatttgttcattttaccttttatctaatttcttgcatagaattgttcatggtattcttgtataatccattttacttttgtaaggttgttagtaaagtccccagtgtcatccctgacttcggttatttgagtcttgtctcttttttcttggtcagtctaacagtttatcaattttgtcgatctcttcaaagaaccaacttttggttttattgattctctctgttgttctcttagtctccattttgtttatctccactttaatccttattttttccttggttctgttagttagctttaggtctagtttgcttttcgttttctagtttctttctttttttttgagatggagtttagctcttgtcaccgaggctggagtgcaatggtgcaatcttggctctctgcaacctccgcctcccaggttcaagcaattctcctacctcagcctcccgagtagctgggattacaggcgcatgctaccacrcctggctaatttttgtaattttaatagagacggggtttcgccatgttggccaggctggcctcgaacgcctgacctcaggtgattcatccgccttggcctcccaaagtgctgggattacaggcgtgaaccaccgcgcccggcctcttttctagtttcttaaggtggaagattcgcttattgatttgagatcttctttcttttgtaatgtaggcctttacagttataaatttccttgagaactatatttcataaatttgtagtttatcccacaaatttcataaatgagagtctgtgtattttttttttgagacagagccttgctctgtcacccaggttggagtgcagtggcacagtcttggctcactgcaacctccgcctcctgggttcaaacaattctcctgcctcagcctcccaagtagctgggattacagacgtgcaccaccacactagggtaatttttttttttttttttttttttttgtgacagagtctcgctctgtcgcctaggctggagtgcggtggtgcgatctcagctcactgcatcctctgcctcccaggctcaagtgattcttctgcctcagcctccttagtagctggaactacaggcatgtgccaccacaccaggctaatttttttttttgtatttttagtagagctggggtttcatcgtgttaggatggtctcgatctcctgacctcatgatctgcctgcctcggcctcccaaagtgctgggattacaggtgtgagccgctgtgcctggctacctgggtaatatttgtatttttagtagagatggggtttcatcatgttggccaggctggtctcgaactcctgccctcaggtgatccacccscctcagcctcacagagtgctgggattacaggcatgagccactgcgcccagccagagtctgtggtatttttatacacctcattgcattttctaatttcccttgtgatttattctttgacacattggttacttaagagtatgttaatttccacatatttgtgaattttctggtttccttctgttactgatttttgatttaatgtgatcagaggagattctttgtatgatttcattcctcttaaatttattgagtgttattttgtggcccaaacacagtctatcctggaaagtgttccatatgcacttgagaataatttgtattctgatgtatcattgggtggcatgctttatatatatatgttagggccagttcatttgtagtgtcattcaagtcttctctttccttgctgatcttctgtctaatttttctatctgcgattgaaaggtgggatattgagctccccaactattattgtggtttttgttttgttttattttgtctgagacagagtctcactctgttgcccaggctagaataccatggcacaatcatggctcactgcaccctcaactgccygagctcaagtgatcctcccacctcacttttctgagcatctgggattactggtgtgccttaccataaccagctaattttttatatttttgtagagatgggtttttgccatgttacccaggctggtctcaaactcctggtctcaagagatccacctgcctcagcttcccaaagtgcagggattacaggcatgagatactgtgcctggcctattattgttgaattgtctatttctcccttcaaatctgtcagtttttgcttcatatgctttggaacactgttgtttggcttgtttataattgttatatcttgatgaatcgactgtttcatgagtatataatgtcctcctttttccttgtctcttgtaacggtttttaacttaaactctatattgtatgatactcatataggcactccagctttcttttggttattgtttgcatggaatatttttctatccttttactttcagctgatttgtgtctttattttatttttttagagacagggtctcactcagtcgtccaggctggagtgcattgctgcaatcgtagctcactgtaaccttgaactcctgggctgatgggatcctcccaactcagtctcccaagtagctaggactacaggagagcaccatcatgcctgactaatttttaaagtactatttgtgtcttttaatctacagtgagtctcttgtagacagcatacagtggatactttaaaaaaaaaaagtttgttctcacaatttctgccttttaattagagagtttaactcatttacctttaatgtcattatttctaatttgattttttttttttttttttttgagatggagtctcactctgtcacccaggctggagtgcagtggtgtgatctctgctcactgcatccattacctcctgggttcaagtgattctcctgtctcagccaccaaagtaactgagattacaggtgcgtgccactatgcccagctaatttttgtatttttaggaaagacagggtttcaccatgttggccaggctggtctcgaacccctgacctcaagtgatctgcccgcctgcacctcccaaagtgctgggattacagatgtgagccactgcgcctgccttgttttctatatgtcatatcttttttgtccctcagttcctccattactgctttcttgtgtgttaagtagatgttttctagttttattttgagacaaagtcttgctctgttgcccaggctggagtgcagtggcacgattgtggctcactgcaaccttgacctcctgggctcaagtgattctcctgcctcagcctcctgagtaactgggactgcaggcatgtgcaaccatgctcagctaattgttttaaatttgttttttgagacagggtcttgctgtgttgcccaggctggtcttgaactcatggcctcaagtgatcttcctgcctcatgctcccaaagtgttgggattataggcatgagccactgtgcccagctctagtgtaccattttaattctctctctcttttttttttaaacatactaacaccaaccggaatctcttgtttcttttgctttattcttttgagttattttctggattgttacctttctcccacctagttcaacccctcagaatcaccaagctaaaggatattaatgctggatctttttgtaaagacaagaaccttttcatagtgtgaataaccgccccctgctatatttgtcatagtctgaaatcagattgtcacatgttgtgttttctaggaatgtggttcctgttttaacgtagtacatgtcaggtaaaaggtaagccagagatagccattcaggagagaactgccagaaatgaaacgcttcctggtgaagggcagtgggtttgggtatgtacagtgccatgatgtttctttttcagctcattcttggaatcccagaacaggccttaagtcttctccacatggccatcgagcccatcttggctgacggggctatcctggacaaaggtcgtgccatgttcttagtggccaagtgccaggtggcttcagcagcttcctacgatcagccgaagaaagcagaaggtaggaagctgtacgaagactgttaggcaatgctattccagaaagcattgaaagtttaggacccagaagaagaaaagacattaaatttgggacagcatttaagttctgagtgttcacaaatatatattaaaatttcatgcagcatttaaagtgctttcacatgcatgcttggcagaaagattgaggacaagtgaatggctattttaaccctatagagccaagtaccaggctagaagtcaggagttaaagacttttttttttttgagacaaagtctcactctgtagctcaggctggagtgcagtggcgtgatctcggctcactgcaacctccgccttccaggttcaagcaattctcctgcctcagcctcctgaatatgtaaaggcgcacaccaccaagactggctaatttttgtatttttagtagggctttctccatgttggtcaggctgatcttgaactcctgaccttgtgatctgcccacctcagcctcccaaagtgctgggattataggtgtgagccactgcgcccggccttttttttttttttttttttttgagatggagtcactctgtcgcccaggctggagtgcagcggcgtgatctcagctcactgcaacctctgcctcccgggttcaagtgactctcctgcctcagcctcccaagtagctgggattacaggtgcctgccaccacacctggctaatttttgtatttttagtagagacaaggtttcaccatgttggccaggctggcgtcgaactcctgacctcaggtgatccacccgcctcggcctcccaaagtgctaggattacaggcatgagccacttcgcccagtcttaaagacctttttgaaaacctcaccctagtggtttgttttttctctctcaaagaatggagaatataaaagaatcttctggtagttgttgaacaaataaaactaaataccacgttttgaaaactatacgtgaagggttgagttaaatgtgtgtgttattttcccctttccgtcagctctggaggctgccatcgagaacctcaatgaagccaagaactattttgcaaaggttgactgcaaagagcgcatcagggacgtcgtttacttccaggccagactctaccataccctggggaagacccaggagaggaaccggtgtgcgatgctcttccggcagctgcatcaggagctgccctctcatggggtacccttgataaaccatctctagagaggacatccctgctgggctgctgtgcagagtataagatttwggacttgttcatgtcccctctctccctataaatgatgtatttgtgacaccctatcttgtcaataaacagcattctgattagtttgtcttattttgttgctagtaactacgtatttgttttattccccttttcttcccttttggtagcaaaggacaccaactttttcttaataaatgggtattttgctaacaagttagtgcaagcatctcagattatgttctctctgggcaaaattgccaatatcttgattagaaattgtacacactccatcattatgtaaattcatttagcacctattctcagacaagagctcttcctggaattggtagatctctccagggtggtcagtgcaggtctgtatgaggcttggactttcttctgaggcctccctgccttgttggactgaaccagcgcttgtggttcctgtggctgctcacgaggacttgttggtccctgactggagattaagaaggaaaagattttttcataatttttggaccaatgaccaggagcatttttcagtccctttctagatgttggctttcttatatattctgcatgggcactttttttttctatatttaactctataaatgagggatgatgataaattacgtccaggaattcatcatgagtaaggtgattataaattaagggggccggctgcggtggctcacgcctgtaatcccagcagtttgggaggctgaggcgggtggatcatgaggtcaggagatggagaccagcctggccaacatggtgaaaccccatctctactaaaaaaaaaaatacaaaaattagctgggcatagtggtgcatgcctgtaatcccagctactcgggaggctggggcaggagaatcacttaaccnnnnnnnnnnnnnnnnnnnnnnnnnnnnnnnnnnnnnnnnnnnnnnnnnnnnnnnnnnnnnnnnnnnnnnnnnnnnnnnnnnnnnnnnnnnnnnnnnnnnnnnnnnnnnnnnnnnnnnnnnnnnnnnnnnnnnnnnnnnnnnnnnnnnnnnnnnnnnnnnnnnnnnnnnnnnnnnnnnnnnnnnnnnnnnnnnnnnnnnnnnnnnnnnnnnnnnnnnnnnnnnnnnnnnnnnnnnnnnnnnnnnnnnnnnnnnnnnnnnnnnnnnnnnnnnnnnnnnnnnnnnnnncccaggctggagtgcagtggcgtgatcttcgctcactgcaacatccacctgggttcaagggagtctcctgtctcagcctcccaagtagctgggactacaggcatgcaccaccacgcctggctaatttttggatttttagtagagatggggtttcaccatgttgaccaggttggtctcaaactcctgacctcaggtgattcacctgcctcagcctcccaaagtgctggaatcacaggcgtgagccaccgtgcctgccccaaatagtctttataaagcaacagggaaccaactaaattgtgcagctcctattattggttctttctctgttaaatttcccatcagaaagtttttctgatggggagtaatttctcttcagggctctttgaagcagtgtaaaacagttgtatccattacggtacatttgctggccaaagacagctgctctggaaacaagagacttggtggagagatagagactaattggtatgttgactgaaaatcttaaattcatttgaaaggttatatatagagatggtaaacattgaataatattaaaggctatgtagtaaaaagtaattcttcagcctgtaatcccagcactttgggaggctgagatgagtggatcacctgagrttaggagcttgagaccagcctgtctaacatggtgaaaccccgtcgctactaaaaataaaaaaattagctgggcgtggtggcgggcgcctgtagtcccaactactcgggaggctgaggcaggagaatcgcttgaacctaggaggcagagtttgcagtgagccgagatcacgccattgcactgcagcctgggtgacaagagctaaactctatctcaagaaaaaaaaaaaagtactacttcctcttaggaggtaactgttatcagttcctttttattctttcaagtatattttttcatctgatgtcatttttgattaatgtatttaaagtaagagcctttcaatttaagaagtggccttagctactctgcctcagcagaaggttgaataaatggggtcaggttgttcaggtgaccccacagataccaacataaaagcttgatgtcatcacgcctgaccaggaccagctatgcaactcatggaatccagtgcaaactaaaaatgtgaggcctctattaaaaagtaaaaatttaaaaggctgggtgtggtggctcacacctgtaatcccagcactttgggaggctgaggtgggcagatctcctgaggtcaggggttcaagaccagcctttgcaacatggtaaaaccccatctctactaaaaatacaaatattagccaggcatggtggtgggcgcctgtaatcccagctacgtgggaggctgaggcaggagaaccgcttgaacccaggaggcggaggttgcagtaagctgagatcgcaccactgcactccagcctggggcgacacagtgagaccctgtctcaaaaaaaaaaaacataaaataatttcaaacrgcaacggcagagccttaaaccaatatagggcccttctgagcccacagccctgcacagtttgcacacctgaaaagccagcctgcccaaagcgcctctcagctgatggcagcttcaccctagcagggagacagggcctaaatccaaagctaatagaaggggtctggggtctcctgctatctgtgacttagatttgttgattgaggggcttgtctcctccctgatagcagagtgggttgaatgaaaagtagagacatttgtgaccccaaaactcagaactgtcggggtgacagctaactggcttttctcctgatagagcatttggtggggggaaaaaaaggagtcaataatttcataatgatgtgatgatgagtggtttaagggtataagaattgatcgtctggttaaatggggaaaaggttaaatgaggagggaattgaaactttttctttttttttttttttcttgagatggagtctcgctctattgcccaggctggagtgcaatggcgcaatctcggctcaccgcaacctctgcctcccaggttcaagcgattctcctgcctcagcctcccaagtagctgggattacaggaacccgccaccatgcccagctaatttttgtatttttagtagagataggggttcaccatattggccaggctggtctcgaactcctgacctcatgatccacccgcctcggcctcccaaagtgctgggattacaggcatgacccaccgcacctggccggaattgaagctttttaagcagcaggcattcgggtctatacccgagatcttcaggatgtatcctctaagggagagaaggaaaaaggtgttctgacctggtggcacagtgggaactctacccagcagccgtgtgccctgttttaagttcttagctatattaacacgtttaatcttcacagtaattccaagagttagcaatagcatgaattccattgaacaggataggatggaggcataagggggttaagttacttgctcaaggccacgctgctgataggttccagggctgggcctacccttagaattttcaaaagtactgtcctgtttttgtgaacattgtttttcagtttgttgaacacataaacgataatattagttgttatttacgtagtgcccaatgtgggccagacactgctatgtacttccacacataccatctctaatgcttgtgagctaaacatcatccctgttttacaggcaggaaagcgggccctggaggttgggcctgacccagccccgaccttggtgaggaccagaatcaggattcagccccagaagtgatgggctccacagcctaggctctttctcacatcaccaggctgcctttgtattcacctccatactctgaatatttctacttgttcaaagtgttttaaatttggtcctaatatttttgggtggttacactggcttttttttttcctgtttctttttctttctttcttttttttttttttgagaccgagttttgctcttgttggccaggctggagtgcagtggcgtgatcttggttcactgcaacctctgcctcccgggttcaagcgattctcctgcctcagtctccctgcctcagcctaggattacaggcatgcaccaccatgcctggctaattttgtagttttagtagagacggggtttttccatgttggtcaggctggtctagaactcctgacctcaggtgatctgcccgccttggcctcccaaagtgctgggattacaggtgtgagccaccgcgcccggccagtttttttcctcgaagatgtatgctgagacaaatgaaaagcctcctcatctgtgcccccatcacttcttctatgatgttgtttatgtttgggactagtaatctcactgcctgttgaagtgaaacttctcaagatcttctttctgacagcatttttcttttcttttttagagatagtttcactatgttgcccaggctggccttgaaatctgaggctcaagtgatcctcttgcctcagcctcccaagtagctgggactgcatgcgcgtgcctctgagcctgacttgacagcatttttttccttttctttctttctttttttttttttctgagacggagtctcgctctgttgcccaggctggagtgcagtgacacgatctcagctcactgcaacctcctcctcccaggtccaagcgattctcgtgcctcagcttcctgagtagctgggataacaggcacgtgctaacatacctggctaatttttgaattttttagcagagacagggtttcaccatgttggccaggctggtctcggactcctgacctcaagtgatcccctgccttggcctcccaaagtgctgggattacaggcatgagccaccgtgcccagccccacagcatttttctttcctttttttgagacagagtctggctctgtccctcaggctagagtgcagcggcccgatctcggctcattgcaacctatgcctcctgggttcaagtgattctcctgactcagcctcctaagtagctgggattacaggtgcctgccaccacgcctagctagcgacagcgtttttctactgtcctggtgaatgggaaaaaaaaaaattcaacaagtgctgtaaatcaaagaaaatgacccaggcaagtctcaatcattttaggaggcttacttgccaaagttaaggaactacctgggagacaggtgtatgcctttctccgaaaatgattttgaaggcttcagtatttaaaggggaaagggcaggatattgagaaatacacaattttcatgtgagagtgggtaggggaaaaatagtcattcatccctttgcctggcttggtgaatctgaaatttttttttttttttttttttttttttttttgagtctcgctgtcgcccaggctgcagtgcagtggcgcgatctcgggtcactgcaggctccgccccctggggttcacgccattctcctgcctcagcctccggcgtagctgggactacaggcgcccgccacctcgcccggctaattttttgtatttttagtagagatggggtctcactgtgttagccaggatggtctcgatctcctgatcttgtgatccgcccacctcggcctcccaaagtgctgggattacaggcgtgagccaccgcgccgggccgaatctgaatttttatataagataacatagaagatagggccaaggaagcaatcagatacgcatttgtctcaggtgagtagagggatgactttgagttctgtcctatgtcccccgcacctgtgaagataagctatccatttacattgccttggagaacttcaacagaactgctttagggtaaagatcttgggggccgccaggaatttccttgtgggcaaaatgtgagggaggtgtgtcgcttttcatctttgtagccaccttatttaggaaccaaaatgggaggcgggtttgcatgacccaattcccagcttgacttttccctttggcttagtgagtttggggtccccagatttcttttcctttcccagtacattggtgtgatgaatcctgctgtctgcatctggatgttcaaggt

SEQ ID NO: 95302 - DNA, 34424 bp, Homo sapiens
ttcacctcagaaaagagcatccacagcatctttcggacggcatccatgctgtgtctgaacaagcctagcccactgccccagaagagccctgtccgaagcctctccaaacgactgctccacctccccagtcgctctgaactcatctcttctaccttcaagaaggaaaaggccaaaagctgttccattatgtgaagtggaaattggaggggggagacaaccccctacttcctcccttggggtgcagaggcacggggagagggaggatgagacaatttaggacactggacatgagtttttcagatggccacggtgagggcttggaaggagacaggaatggggcgaggaaggagccaggcccggcatgaggacctgacgctgagagagaaccatcataccccaagccaggcactagattttggagggggcgactaccccagtgccccccccgctccagaggaaggaaagctgtgggggacggggggcatgctggcctcatgggcttgggggcctacagcagcctcaccttcagcttcatgcctcttccacacagcgtttccatgcaggtcaggggatgggaggggtccctgagcccttcccttcccctctaaggaggcagcaacggagagtggggaagtggagcggcagctcccttgggggcttagcccaggtgcttcgtaactgcaatcggaagtgcaggagctggtcagagccaatgagaaggaaacctcatctttgcatagcccatgcctcatggagaggtgacatcatacattcacatgcttctcacctaagtccccagggtccaagggagaagccccagacccccttctcttgcagagtgtgggggtggtggtgctgcaggggcagggctgggtgggggtcaccagactttttctgcccttagggtagtacagctggcatttgttttatagactcttgtctttggaattggggggagggggggagtgtttcaatctgttatatgttctgtgtttaatgaagaaaacctatttattaatgaaaaatataatacatataaagaatttggctccgtatttttttctgttttctttagttgttacaattggtattttttttttttggtcttttttttttttcctttttgtggagaacagggtctcgctatattgctcaggcaggtctcaaactcctgggctcaagctatcctcacatctctgcctccctaagagctgggattacaggcatgagccaccgtgcttgagccctttggttgatgataatgagagaaaagctgtcctgggaccctttctgtgggttgcagaggggctgcctccaccattccccagctcctccaagaaggagcttctctcttcccccatccccctgccctagccccacccaagacctactaaaccaaggaagggctccttagcccgagagcaggggtgcaggggttctcaaccctggaactattgacattttggactggataatgctttgttgtgagggactgtcctatgcagcccaagatgtttagcagtgtccctgatctggtggatgctagaagacagcaccccactctccagctatcacacccaaaaatgtctccagacgttgctaaatggcccctgtggaaaaattctggttgagaaccactgccctggagagtctagaggagagaaaaaggttggatgaaatcatcagtagaggatccaagctgctgagattccaccccacatagaaggtggacagactaagccaaagctgggggaggctcctgggattctggtctcctctgagttcaaggagaggtgacatttgccttcatgaccttccaattccgatgcctactgatggcagctcaggggccttaactcttaacttcctttctcagtgacttatagctcttgttttccaagtgccatagtgtagtgctagtgccagaaataaagttagcatgtactaggccaggcgcggtggctcaagcctgtaatcccagaactttgggaggctgaggcaggtggatcacaaggtcgggagatcgagaccatcctggctaacacggtgaaaccccatctctactaaaatacaaaaattagccgggcatggtggcacgtgcctgtaatcccaactactcgggaggctgaggcaggagaatcgcttaaacccgggaggcagaggttgcagtgagccaagattgcgccactgcactccaacctgggcaaaagagggagactccatctctaaataaataaataaataaataaagttagcatgtacttaatgagtgttcagcactgtgcactgtgttgagggctttacatgatcacatttagactcataaatgataagagctaacatttgttaaatgtttactatgggtcggggcacttacgagatttttctttttttttttttgagacagggtctcactctgtcgcccacgctggagtacagtggcatgaccactgctcactgcaacctcaccctcctggttcaccgtcctgatcaccctcctgaccctcctacctcagcctcctgggtagctaggactacaggagtaccacagtagtagtctattttttgtggagatggggtttcaccatgttgcccaggctggtcttgaacttctgggctcaagtgatcctcctgcctcggccttccaaagtgctgggattacaggcataaaccatggtgcccggccccacttacgagttctttctatgttatttattcctgtgataaccctatgagcctatgaggtgctatttttttttttttagacggagtttcactctggctggagtgcaatggcacgatcttggctcaccgcaacctctgcctcctgggttcaagtgattctcctgcctcagcctcccaagggactacaggcatgtgctaccatgcccggctaattctgtttttgtttgtttgtttgtttgtttttttagtagagacgaggtttctccatgttggtcaggctggtttcgaactcccgacctcaggtgatccacccaccttggcctcccaaagtgctgggattacaggtgtcagccacggcgccccgccgctatctacttcattttacagaaaagaagaccgaggttcagagagattaggtaacgtgcacaaggtcacacagctaggaagtggttgaacatggatacaaatccaggcaatctggcttcacatcatgcactctaacttgctctgctgtcctgtcctgtgagggaagtggtattattatctctgttttgtaatgaggaaagagaaaagccagagatgccatataatttgcacaagatcacagtactagtaagcaattgagccaagattcaaaccagaactcactgttcaccaaaatcccatggaccccttactggtaggcatgttgtacctaaataggtatctccagttatggttcttactagaacaccatccctctgtctctgtctccaaagatgatggtttaggtgtggtgactggtgcctgtagttctagcactttgggaggacgagccgggcggattgcttgaggccaggagtttgagaccaaactggacaacattgcaagaccctgtctctacagaaagtaaaacgattagccaggcatgatggggtgcacctgtggtcccagctacttgggaggctgaggcaggaggatcacttgagcccaggtcagggctgcagtgagctgtttgtgccactccacttcaacctgggcaacaaagtgaaacccggtctcaaaaataaataagtaaataagccaggtgtggagtctcacgcctgtaatcccagcactttgggaggccgaggcaggtggatcacgaggtcaggagatcgagaccatcctggccaacatgatgaaaccccgttcctactgaaaatacaaaaattagctgggtgtggtggcatgtgcctgtaatcccagctacttgggaggttgaagcaggagaatcgcttgaaccagggaggtggagattgcagtgagccgagattgcaccactgcactccagcttggcgacagagcgagactccatctcaaaaataaataaataaataaaataaaataaaaatacaaacaaataagaaaacaaagattcatgtttgtgagagaactagtggggcaagacaaataacaagtatccttgaagcccaatgtcttacatgtgtcatgagatgtgcgcacaagtactagaggaactctgccactatgaactgggacaagctttatcaccctccaggagctcaatttaaagagagttgagatggcagcctgaaaatggggaaaggtaatggactctgaagttaaatgaacctgaattttggctccattcttttcttttcttttttctttctttcttttttttttttttccagtcagggttttgctctgtcacccaggctgtagtgcagtggcacgagcatggctcactgcgacctcgacctcctgggctcaagcagtcctcctgtcttggcctcccaaagtgctgagatacaagcatgagccacctcacctggcccattcttttaactatgtggcctttgaaggcataattactctttctgggccacaatctccttaccagtaaaatggagatagcactcatctcatactgctatgagaactaagtaaaacaaataaggtaggttaagtgtccagcccagagctgagcacttagaagattctcaataaaaagtggctgcagtttttgaagattctggcctaccatggttggtctgattcttagtttaatctgtgaatctgtgagtcgagcgccctctcgtgcttttgtggtgaattacacctaacagatctcagagctctcttctttcccttgcgttctctctggagtagaagctgggaggtgaaaggctgcaggttctaagagaagtgtgtgtctccgagggttactttgggccattgtacgtgatgctcagggctttaggattacttgggtctatcctgaggctctgcttgagagcttgggcatattcagagagaaaaggcagacctacagccatgtggaattgaagcaacaaacctgctgctggcaaaatgggaagggaggtccgagatacttctggttatctaaaccgtttccgcaactgcaatgttttgttttgttttgagggaaagagttatgaacccataagaccaaagagaaacacaaagtgaacttacgatttgaggttaaaacaacaacaacaacatcaacaacaacaacaacagcaacaacaaaactcagtggaagactgaagtaggggaatctgggggaagaaagaagcaaaaataccaagatagctcaacaattggtcacattccaaagggcaagaaattgaggaaaccagggttccatctggaatgttgagaaaacaggtgctagagcccaggagataccatccttccgggaggactttagagcccattgtgtgggctcatttggagctgtaacaataactgggggttgttatggcattcacccggctgcaggggccaaggttgctaaaacgtcctcctaagcctgggatagttccacacacaatggagaactgcatcaccctccttgtgaacctactccggtaacctgatctttagtttgtccaactgtaaaatggggctagccccattctcacagaattattataaaaaccgcttttccacgaatggtatttattgttgttactgcggttgttagctataattacgtactacagatatctcaggaagcccttaaattcctccactgtaagccacgggcaaggacagtcatagaccgtagtttctaggaagaccagccgattccaagaagggtgctcggcgggagaacctaatgccgaaagcctattggcgaaaaactcttccttcccggacgctaacgtctggcaaaccacattgcccggcagaccccgcagcctgggrccggcgctcaagtcatgcattctgggattggtagtttccaggcytcagtgtcggcctgtgccgcccagctccaggaactcgccttcccagcttgcctcgcggccgggggggtggggggtgttcatctccgcgaccaggaaacgggaaagatggcgacggctccgcgacgttgaggccgcgttgggcggttcagactcagggtggtgagtcccgggcggtggaggcggttcccacgagcttacagaaagggctagagtcagggcacggcggtggcccctgcctcctggatgaggcgggaaagaacgcctcagagaaggggcatgaacccgggaagctcgggcgggctggagtgaaggggcgcgggccccaggggtagtgttggctcctccgggcacaggccacgtccctgcacgatattttcctcccaggactctgcctatgggcacagcgcctctgatacccccagtctgaccttattctttcatgcttaaagtagcctttggtgcagccaaactggaactctggcttttctctcgcagtcagtccatgttttcccgcctctgcgccggccgtattatttcttttgccgggaatgacttcttttccgcgtccttaattacatatcttaaaattctacttatacttaaaagctcaagcgtcacttcctcttccaagccttccacatcaccttttacaagtgaaaggaaacgcctttgaacacctgtattactacatctgagccttgatactcttcttggtatgtgtctcataccccctattgttcttttttttcttttcttttctttttttttttgagacggagtctcgctctgtcgcctaggctggagtgcaatggcacgatcttggttctctgcaacctccgcctcccgggttcaagcgattctcctgtctcagcctcccgagtagctgtgattacaggcgcacgccgccacgcccggctaattttttgtatttttagtagagacggggtttcaccgtgttccccaggctggtctcgaactcctgagctcaggcaatccacctgyctcggcctcttaaagtgttaggattacatgcgtgagccaccgcgtccgacctcataaccctgttgttctaaacacttcctgtgaacagaatttatttttgtaactcacatagcacctagcactgtgccttgcgtacagtagatgcttgttaaatacgtcattgagtgaaaaaaaagaatgtgcccctgccctgcaagaactgaggacctgaagatmtggaggtttgagaggaaggctgctgggaagcatggccagagtcagcctggttatttggcccttgtgataatagaacctgtaataaaagttgcctgtatttactgtcttcttctcatttttcattctcttccaaactcattccactcaggcttccattcccgcaatgcaamtgaaacagctcttgtcaaggtcaccaataatctccatttttccaaattcagtggttacttccctgtcccttattccctctccacttcggtggtacttgacacagttgacccctccctccttgaaacatgtttttggcttcttcgttgccatgcttttctttgtcttttctcactggctgctagttcttttcagtctttttctctggttcatcccgtggctaactcctgttaaagtgttccagagctcaattctggagcttcttctctattttttttctttcactatgctgcctacttaggtaatatcatttagtgtcccatggctttaaaagctatctgtgtattggtgactcaagtttttgtctacagaccctstcccctaagttcagatttgcatttctctttgccttctgggaatctccacagatattctcacactcaacctggccaaaatgaaacgtttgatttcctcttaaatctgttcgttccctagtcttctccagtttgtttgctatggcaccacaaactattaggttgctgaaactataaatttaggagctatctttgtgtctgctctttctgcttcttccttagtaagtcctgttagctttgcctccaaaatatactctgacgctgcctacttctttccatctccatcgccacgttcctagaacaagccactgccatctcttgcctagagtaccataatagcactctcagtggttgtgttttcactctgtctctctgctatatattttcttgcaagtcaccaaagtattagattgcttcctgtttaaagctcttctaagatccccattgcagttaaaatccaagttaactctactctgacctgtaacacattttcattatctgactcctgcccagctcactgaactcatcctgaatcagtattcctcctgcattagtgcttcccagggtcaagaagtctttccacctcagcctgggctcaggtgatcctccccaggcaggagcgaaggggcatgggccccataggtagtattggctcctgggggcacaagccgtgttcctggacgatattttcctcccaggcctctgcctatgagctcttgagcacttttgagctcaggcattccacccaccctagcctcccaaagtgctaggattacaagtgtgaaccaccacacctggctgatttttttttttttttctctcgagacagagggagtcttgctctgtcacccaggctagtgcagtggcactatctcggctcacaacaacccgcacctcctgggttcaagcagttctgcctcagccttccgagtatctgggattacagatgcctgacatcacgcctggctaatttttgtatttttagtagagacggggtttcaccctgttggccaggctggtctcgaactcctgacctcatgatctgcctayctcagcctcccaaagtgctgggattacaggcgtgagccactgctcctggcctccggctgatttttaactgtttataaatgtaaaattttattgttcaaaatagacgggaagtcttgctatattaccctggctggtctcgaactcctgggcttaagtgatcctcccgccttggcctcccaaggtgctggtactacaggcatgagccaccaggcctggccaaacaaatatgtttttaactgacaaacgtgtagttgggctcacacctgtaataccagcactttgggaggctgaggccgaaggatcccttgagcccaggagttcaagactagcctgggcaacaaattgagaccttgtctctaataaaaattttaagaattagttggggccgggcatggtggctcatgcttgttatcccagcactttgggcactcagggcggatcacctgaggtcaggagtttgagaccagcctggccaacatggtgaaaccccgcctctactaaaaatacaaaaattagccaggcgtggtgtggcacgcgcctgtaatcccaactactcaggaggctgaggcaggagaatcacttgaacctgggaggtggaggttgtagtgagccaagatcatgccattgcactccagcctgggcgacagagcaagactccatctcaaaaaaaaaaaaaaaaattagtcaggtgtggtggcatgcgcctatagtcccagctacttgggaggcctaggcaggaggatcgcttgagcctgggaagtcaaggctgcagtgtgccgtgattgtgccactgccctccatcttgcgtgagagggtgagaccctgtctcaacaacaacaacaacaaaacaaacctgacaaacatgctaagctagttcacatttcttgtatctaacaagggttttttaccctgatcttttcatggccctctttcccatcattcaagtctcagcttaaatgtcaactaaaacttcttccctgagccatctatctcttgttatacccctacccatcatatcactgttttattttcttcattagcattcattactatttaaaatcctttccgctacactagaatttaagctttatgaagtaggagactttgttttctttttttttttgttttttgttttgttttgtttttgagacggagtctcactctgtcacccaggctggagtgcagtggcatgatctcggctcactgcaagctctgcctcccgggttcacgccattctcctgcctcagcctcccgagtaggtgggactacaggcgcccaccaccacgcccggctaatttttttgtatttttagtggagacggggtttcaccctgttagccaggatggtcttgatctcctgacctcttgatctgcccgcctcagcctcccaaagtgctgggattataggcgtgagccaccaygcccagcatgagactttgttttctttactgctttgtctccgttacctacaacaatttctggcaccttgtaggtgctcggtgaatatttgttgaaagaatgaatgaaatccaggatgctgtacagagaaaatagccttcctttgggattgttttcttagggctgtaagtgttttttttattttttattttttggtgtgtgacagggttttgccctgtcacccagactggggtgcagtggcacaatctcggcttactgcagcctctgcctcccgggctcaagcagtccttccacctcagcctcctgggtagcgtgtaccaccatgcgtggctaattttttatatttttagtagagatgggtttttgccatattgcccaggttggtctcgaactcctggacaagcgatccacccacctcagcctcccaaagtgctgagattacaggcatgagccaccacacccagtcaagacataggtatttctttctttttttttttttttgaaacggatcacgctctgctgccaggctggagtgcagtggtatgatcttggctcactgcaacctccgcctcctgggttcaagtgattctcctgcgtcagcctcctgagtagctgggactacaggcacgtgccaccatgcctggctaatttttgtatttttagtagagatggggtttcaccgtgttggccaggatggtctcaatctcctgacctcatgatctgcccgctttggcctccaaaagtgctaggattacacggtgagccaccatgcccagcccaagacataggtatttctgtgtgatagccatgatgtactgatacagaacaatcagtcatttctcaggtgattgtgagataaaatgggttgtcctcaccttttgaaagtgcttcttgttcatttttcttttctcatctttatacaatctttcttaaggatatatggcagggaatggcatgagaaaggggcttgtaagctaaagcttaaggaaccattcgagctgaaccmtttggggataaaataagttgcgagaaatgtatcccaagtctttgggatgatgatgaggtggttgcagattcaggcttgctgcagttttagctcctggctgaactagagttcatagcccaaagaagagttgacagtgtgggagtggtgttcggtgtctcccaggtaggagggagacagaaaaaattcctgctgaaacctttcacaaaactgggttatgcagatgaccaaggttgtgaaaatctgaatagggaatgtcaatcaggacttctgcaacctctagttttgggtatttaaaatatatatctttgaaataattatagtttcacaggaagttaaaaaatgtgtatagaggttctgtgtacccttcaccaagttcttcccattgcataattagaggtacatttcttttaatctgagtaaaagtgtgtttctccacttaaattcaggttttccttgtggtgctaattataacgtaatccagatctcaaagttaaacttttttctccattgagctttctttatgagctcaagaaaatttatctctctcagacgtatgagtgctaactgatcctagtgggttggcagacctaataaacttcaaagtaagcaatataggatgtttctagaaatagttggtacactgttcatacactaacacttcttttaatactcttttgtagtctaattacaaaaacatggtatattcactgtacatatttagaaatgaatatataaaaaggaatcgaccaggcactgtggctcacgcctgtaatctcagccttttagaggctgaggcaggaggattgcttgaggtcaggaatttaagaccagcctgggcarcatagtgagaccctgtctataaaaaaaataaattagctaggcaaggcaggaggatggcttgagcccaggaagttgaagctgcagtgacctatgattgcaccactgcactccagcctgggtgacagagtgagactctgaaaggaattacagggagacaatatagtgagtaacgatggcctgtggagccagactgcctgcaactctgccactacctgtctgccctcagacaagttcctttatatacctgagctccaccgttctcatctgtacggtagacatactaatatatccacctcatagggttgttttgagggtaattgaattatatataagcagtttagagcagtgcctagtacattgtaagtactcttcctactcattacagatggcaggagagctggctgacaaaaaggaccgtgatgcatcaccttccaaggaggaaaggaagcgatcacggactcctgacagagagcgggatagagaccgggaccggaagtcttccccatctaaagatagaaagcggcatcgttcaagggatagacgtcgaggaggcagccgttctcgctctcgttcccgttccaaatctgcagaaaggtaaagtaactttgtatgttattacatgggaagggagagtacgtttcagatttcttccttcttggttcttctgatgcctccagtattaggcatctactttttatttttattttttgagacagagtctcgctctgtttgttacccagactggagtgcagtggtgcgatctcagctcactgcaagctccgcctcgcaggttcacgccattctcctgcctctgcctcctgagtgcgtagctgggactacaggcgcccgacaccatgcccggctaatgtttttgtatttttagtagagatgaggtttcaccgtgttagccaggatggtctcgatctcctgacgtgatctgcctgcttcagcctccccaagtgctgagattataggcgtgagccaccgcgcctggcctttttttttttttttttaaaagatggagtttcactcttgtttcccaggctggagtgcaatggcacgatctcggctcactgcaacctctgcctcccaggttcaagcaattctcctgcctcagcctcccgaatagctgggattacaggcatgtgccaccacacctggctaattttgtacttttagtagagacggggtttctccacgttggtcaggctgatctcaatcttccgacctcaggtgatccacccacctcagcttcccaaagtgctgggattacgggcgtgacgaccacgccggtctaggcatctactttttgtacattaatctactcctagcccagttggacctgcaggtgttttcagttttcctcagtgacccaactcttaaaagttgagagggggccgggcgcggttggttcacgcctgtaatcccagcactttgggaggccgaggcaggtggatcacgaggtcaggagatcgagaccatcctggctaacacagtgatacctgatctctactaaaaataaaaaaaaaaaaagttgagagggaactagtaaggtgaaggtccgggttatcaaggaaggttcatctgtggccgggcgcggtggctcatacctataatcccagcactttgggaggccgaggtaggtggattacttgaggtgaggagtttgagagcagcctggccaacatggcaaaaccccgtctctactaaaaatacaaaaattagccaggcatggtggtgcacatctgtaatcccagctactcgggaggctgaggcatgacaattccttgaactcgggaggcagaggctgcagtgagccgagatcacaccactgcactccagcctgggcgtgagagtgagactccatctcaaaaaaataaaaaaggaaggttcatctgttcacatagtccgtgacctgtcattgcygttaatatttaacagtacatctctgatctataaaagcttcttagaattccctcgttatttccgtgagagatacattctctaatttgtaaaacattactttgggacgagagtataggaactttctcagggctgcagtgaagcaagatactttggaaataccaagtgaactcttaaatttgcggtcttccagagaacgacggcacaaagaacgagaacgagataaggagcgggatcggaataagaaggaccgagatcgagacaaggatgggcacagacgggacaaggaccgtaaacgatccaggtacatgaaggaatgagagggggctttaggggaatgctcccatttcttctctgcacctgagtttgctcagyttcttatgaaagtagatttctcgccaggcgtggtggctcacgcctgtaatcccagcactttgggaggctgaggctggtggatcacgaagtcaggagatcgagaccatcctggctaacatggtgaaaccccgtctctactaaatatacaaaaaattagccgggcgtggtggcgggtgcctgtagtcccagctactcaggaggctgaggtaggagaatggcgtgaacccgggaggcggagcctgcagtgagtcgagatcacgccactgcactccagcctgggcgacagagcaagactctgtctcaaaaaaaaaaaaaaaaaaagaaagaaagaaagtagatttctcttaacagattctgttggtagttattacagagctctctttcttatttatttttatttatttttttgaggcagggtctcttttgcccaggctggagtgcagtggtgtgatcacaacttactgcagccttgactcccccaggcttaggtgatccacccacctcagcctcctgagtagctggactacaggcatctgccaccagattttgttttttttgggtttttttttttttaattgatcattcttgggtgtttcttgcagagggggatttggcagggtcacaggacaatagtggagggaaggtcagcagataaacaagtgaacaaaggtctctggttttcctaggcagaggaccctgcggccttccgcagtgtttgtgtccctgggtacttgagattagggagtggtgatgactcttaacgagcatgctgccttcaagcatctgtttaacaaagcacatcttgcaccacccttaatccattcaaccctgagtggacacagcacatgtttcagagagcacagggttgggggtaaggtcacagatcaacaggatcccaaggcagaagaatttttcttagtacagaacaaaatgaaaagtctcccatgtctacctctttctacacagacacggcaaccatccgatttctcaatcttttccccacctttcccgcctttctattccacaaaaccgccactgtcatcatggtccgttctcaatgagctgttgagtacacctcccagacggggtggtgggcgggcagaggggctcctcacttcccagtaggggcggccgggcagaggcgcccctcacctcctggacggggcggctggccgggcggggggctgacccccccacctccctcccggacggggcggctggccgggcagaggggctcctcacttcccagtaggggcggccgggcagaggcgcccctcacctcctggacggggcggctggcgggcggggggctgacccccctacctccctcccggacggggcggctggcgggcggggggctgacccccaccttcctcccggacgggtggctggccgggcggggggctgacccctacctccctcccggatgggcggctggcgggcggggggctgacctccccacctccttcccggacgaggcggctgactgggcagagaggctcctcacttcccagtaggggcggccgggcagaggcgccctcacctcccggacagggcggctggcgggccgggggctgacccccccacctccctcccggatggcggctggcgggtggggggatgacccccccacctccctcctggacggggcggctggccgggtggggagctaaccccccccacctccctcccggacggggtggctgccgggcggagacgctcctcacttcccagacggggtggctgccaggcggaggggctcctcacttctcagacgatgtggctgccgggcggaggggctcctcacttctcagacggggcggttgtcaggcagagggtctcctcacttctcagacggggcggccgggcagagacgctcctcacatcccagacggggcggcagggcagaggcgctccccacatctcagacgatgggcggcctggcagagacgctcctcacttcctagatgggatggcggccgggcagaggctgcaatctcggcactttggggggccaaggcaggcagctgggaggtggaggttgtagcgagccaagatcacgccactgcactccagcctgggcaccattgagcactgagtgaacgcgactccgtgtgccatcccggcacctcgggaggccgaggctggcggatcactcgcggtyaggagctggagaccagcccggccaacacagcgaaaccccgtctccaccaaaaaaatacgaaaaccagtcaggcgtggcggcgcacgcctgcaatcgcaggcactcggcaggctgaggcacgagaatcaggcagggaggttgcagtgagccgagatggcagcagtacrgtccagctttggctcagcatcagagggagaccatggaaagagagggagagggagaccgtggggagaggggagaggggagagggagcctgaagcttttctatctatggattcttctctgaatctttgggggtttttttgagatggagtttttgttctgttgcccaggctggagtgcaatggcacgatctcggctcactgcaacctctgcctcttgggttcaggcaattttcctgcctcagcctcccaagtagctgggaatacaggcatgcgccaccatgcctggctaatttttgtatttttagtagagacagggtttctccatgttggccaggctggtctcgaactcttgaccttaggtgatccggccacctcggcctctcaaagtgctgggattacaggcgtgagccattgtgcctggcctgtatacagagttcttatcaggccctgaaagtataggttagaattcaaggcagaggacagaatgctcctaacagaaactcagtggggttgtttgaattatcttgtagattaagcttagagcaggtatggggaaaggattgttgggattgataggaatgaaaaatgatgagggaatatagatagcagtatcttcttggcttgtggtggtggccatgtaggctaaattcattgtatattaaagagttaaggagggccaggcgctgtggctcacacctgtaatcctagcactttgggtggccgaggtggatgtatcacctgaggtcaagagttcgagaccagcctggccaacatgatgaaacctcgtctctactaaaaatataaaaattagccagtggtggcagtactcgcctgtagtcccagctactcaggaggctgaggcaggaaaatttcttgaacccaggaggcggaggttgcagtgagctgagatcacaccattgcactccagcctgggcgacagagtgagactgtgtctcaaaaaaaaaaaaaaaaaaaatttttctctaaacaaccacacctggctaatttttgtgtttttactagagacagggttttgccatgttggccaggctggtcttgaactcctgacctcaggtaacccacctgtcttagcctcccaaagtgctgggattataggcatgagacaccgcgcctggcctaggggaaatatttttgacatcagtagtaaagtcccacttcccaaaagagattagtctcaaaaggagatttgggtagaaaggggccaagacagggccataattaggtttcagagctggcagaatgaccatgcctgctaagagagtttcaagacatgatagatgaccatgggccagtcttgttgagtcatggggaaacttccattctcttttcggggctcaacttgaacctcatccaggcactgaagtaagagtgatgtggaccttgttccttttcctcaaagcttatctcctggtcgaggaaaagactttaaatctcggaaggacagagactctaagaaggatgaagaggatgaacatggtgataagaagcctaaggtaaaggagaggaaggatatttttcatcttcaactcgtgcgttgctttgttgatctttaaagggagagagcctttatagactaaagttctgttttatcttcaggcccagccattatccctggaggagcttctggccaagaaaaaggctgaggaagaagctgaggctaaggtaagtacttgagggtcttcattcatcggctcaggctgccataacacaataccacagactgggtgacttcaacgacagaagttaattttctcacagttctggaggctggaagtctgagagcggagtgtcagcagggttatttcttctgaggtctctctccttggcttataaggctgtcttcttcctcagctcttcacatggtcctccctctgtacacatgtaccccttgtgttggattagggctcaccctaaaaggcccttttttttttttttttttttttttttgagacagagtctcactctgtcgcccaggatggagtacagtggcatgatatcggctcacttcaacctccacctcccaggctgaagcaatcctcccacctcagcctcccaagtatctgggactacaggtgcgtgccacaacgtccagctaatttttgtattttttgtagagtccagatttcaccacgttgtccaggctggtctcgaacccctgggctcaagtgatctgccctccttggcctcacaaagtgctgggattacaggcgtgagccactgtgcccagcctaatgggctcattttaacttaatcacctctttacatgtcctgtctccacatatagtcaaattctgaggtactaggagttagggcttccacataggaattttgagctgggtacagtggctcacacctgtaatcccaatactttggaaggccaagatgggaggatcacttgagccagggatttttagaccagcctaggcaacatggtgaaaacccatctctataaaattttaaaaattagccatctgtggtagcatgcgcctgtagtcccagctactcaggaggctgaggcaaggatattgcttgagcccaggaggttgaagctgcagtgagccatgatgacaccactgtactgcagcttgggcaacagagcgagagtctgtctcaaaaaatatatataacacatgcattgtttgtttgtttgtttgagatggagtctcgccccgttgcccaggctggagtgcagtggcatgatctcggctcactgcaacctctgcctcccaggttcaagcaattctcctgcctcagcctcctgagtagctgggattacaggcacgtgccaccatgcctggctaattttttgtatttttttagtagagatagggtttcactgtgctggccaggcttgtcttgaactcctgacctcgtgatccgcccatctcggcctcccaaagtgctaggattacaggcacaagccaccgcactcggccacattttttttttttttttaaaggtaaggtcttgctcgtttgcccaggctaaagtacagtggtgcaatcacagctcactgtaacctcaaactcctgggctcatatgattttcctgcctcagcctcctgagtagctgggactatatgcacatgccatcatgtctggctgagtttttttatttttgtagaaacaaggtctgctatgttgcccaggctggtcttgaactcatggcctcaagcggtcctcccatctaggtctcataaaacactgggattacaggcatgtgccaccacgtccagcctgaaaaaacatatgaattctgtaggggacatagttcagtccataaccgagtccaaggcctatttgtgttttcctcaacaggcttaatgcctgagcaaatacttttgggttccctgccatctccccatcagtgatgtgattgtaccctgctcccagatcctttgttgacagttccaatctcttttgtagcccaagttcctctctaaagcagaacgagaggctgaagctctaaagcgacggcagcaggaggtggaagagcggcagaggatgcttgaagaagagaggaagaaaaggaaacagttccaagacttgggcaggaagatgttgggtttgttattctaccctgtgtagccyctagatggaagaggaaagagtgggatgagatacagtgtctcttaggagagatagaaacctgttcactctggagtttggaaaggggaaggatggtgggagtttatgagaaaacatttttctgttagatytccatttaccccatatcataagtctacccctttttttcttcatttggggttcctcgtctggattccctccattccctctcctcttttcttccatgagctcttctgcagctttgctttctttggtctgcagaagatcctcaggaaygggaacgtcgggaacgcagggagaggatggaacgggagaccaatggaaatgaggatgaggaagggcggcagaagatccgggaagagaaggataagagcaaggaactgcatgccattaaggtgcaggccttggctccatcttcacttctctcccacacaaaaatgaggtttagttatttggccattgtgatctctgcatgtgagaattgggcctcaaagctcatgtgctttgtgttctgtccctgggtaggagcgttacctgggtggcatcaaaaagcggcgccgaacgagacatctcaatgaccggaaatttgtttttgagtgggatgcatctgaggacacatccattgactacaaccccctgtgagtggcttcaggcctgagttctaggtcttttccactaggcagtcctagagagctgatgactacggaggtggaggaagtaagataagctgggatggaaaattggtagactggtagtcagccagccctctggtggaagaaagaccctgtctgggaagaactgtttcatactagtagtctgcccttccttcctactgccgttaacagctccttcttttttcttttcctctatctcaatcccaggtacaaagaacggcaccaggtgcagttgttagggcgaggcttcattgcaggcattgacytcaagcagcagaagcgagagcagtcacgtttctatggagacctaatggagaagaggcgaaccctggaagaaaaggagcaggaggagtgagtgatcaaggctagggtggctggacagagcccagaggctctacagaaaggagttggagggcactgattctacttactcctcacaccctgctccagggcaagactccgcaaacttcgtaagaaggaagccaagcagcgctgggatgatcgtcattggtctcagaaaaagttagatgagatgacggacagggactggcggatcttccgtgaggactacagcatcaccaccaaaggtggcaagatccccaatcccatccgatcctggaaagactcttctctgcccccacacatcttggaggtcattgataagtgtggctacaaggtaaggagggatagattggcccaagagatctgacatgttcctacactagtttgggaatagagaactttgttccttgactatttggagccatcgctgctagtgggcaccaatgtgaccttttctgtcactttctggtagaagtgttggcttttagtgattaggtttcttcttggggtccctatttctgtgaactgtacttggcatccttccattgtgctagcagatgtgcttactactatcagtggttgcccaggtggtataactctccctgtacctattactctttcttggggtcactgcaggaaccaacacctatmcagcgtcaggcaattcccattgggctacagaatcgtgacatcattggtgtggctgagactggcagtggcaagacagcagccttcctcatccctctgctggtctggatcaccacacttcccaaaattgacaggtgaggtcagctagcaccagctggagtgggtttgtctgggtaggaaaggtgaaagtggcaaatgaatgtttgatttttgttttacgtctataatcagaagctttcttctttattctttgttggatattagggaataattggatcatgatatcgaagaagtatatgttgctggcaaagacctggagaactttgctatcctggagtctctgatttattttatttatttttttgaggcagagtctcactctgtcacccaggctggagtgcagtggcacgatctcagctcactacaacttttgcctcccaggttcaggtgattctcctgcttcatcctcctgagtagctggggattacaggcgtgtgccaccacttctagctaatttttggttttttgttttgttttgttttttgagacggagtttcgctcttgttgcccaggctggagtgcaatggcgcaatctcggctcactgcaacctcctcctcccaggttcaagtgattctcctccctcagcctcccaagtagctgggattataggtgcccgtcaccatgcccggctaatttttttgtatttttagtagagacggggtctcaatgttggtcaggctggtctctaactcctgacctcaagtgatctgcctgcctcagcctcccaaagtgttggaattacaggcgtgagccagtgtgcctgtccttaatttttacatttttagtagagatgaggtttcaccatgttggccaggctggtctcaaactcccgatctcaactgatctgcctgccttggcctcccaaagtgctgggattacaggcgtgaaccactgcacctggctgaatctctgatttttatgtatttattatttatttatttatttattttttgagatggagtctcgctctattgtctaggctggagtgcagtggtgtgatcttggcttacagcaaccgttgcctcccaggctcatatcctcctacctcagcctcccaagtagctgggattacaggtgtgttcgaacatgcccagctaatttttgtattttttgtagaaacagggttttaccatgttgcctagactggtctcaaactcctgggctcaagtgattcactcacctcagcctccgaaagtgctcggattataggcttgtgccaccttgcctggcctctggacttatttttatttttattttttttggagacagagtgtctctgtcacccaggctggagtgcagtggcgtgatctcagctcactgcaacctmtgtctcctgggttcaagcgattcttctgcctcagcctcccragtagctggtattacaggcgccggccaccacgcctggctaatttttgtatttttattagaggcagggtttcaccatgttggccaggctggtctcaaactcctgacttcaggtgatccgcctgcctcagcctcccaaagttctgggattacagacatgagccaccatgcccagccctggcctctgatttttaagtgagatcattgcattcttttctcatcatcctccccattcccattgctccccgtaagagtgactttgtcttgctctggcttgtggttggataagaaccaaagctcacgaagctgtggggcaccctgtttaccacaggatcgaagagtcagaccaaggcccttatgccatcatcctggctcccacccgtgagttggctcaacagattgaggaagagaccatcaagtttgggaaaccgctaggtatccgcactgtggctgtcattggtggcatctccagagaagaccagggcttcaggctgcgcatgggttgtgaggtttgtttttctatctagcagccagsctgctgtctgggaaggctatcttggggctttgtttctagtttctggaatatatgtgcagtagtatgaagaaaggagctggtttatatatatgtgctatttattgagaacttatgcaccagggtttatatcacaaatagtatatatcatatatattagctcattaattctcacaataatgtatgagagtggtatttccttgttatagatcaagctgaggttcaggttaataactgcctgaagtcacaaacagctggcaatgggcagagctgagactcatatccatagcctgtgcttttagttactctttactctgccagaccaaatctttgactttgtgcattgccttcatctcaggaaagtggaggagagctctttatgagaagtctgctgtagaaatttagtctttttacaattttttaaaaaaatttagtctttatacaacccccttcatagtaccccttagtctctcccatctaagaagttccttcttcaggatctgaaatgatttgccaaaaaaaaaaaagtttctactgattttgcctcctctgtctaatccttgcaccttactcagagacctcattcattcctgagaaaatccaggcaacaagtgatttcatgccagtttgcaggagcctttactgctaaacataaccagaggttggggtccaagttcctcagcattggaggtctgtcacccaagtgggtggatagttcacaggaaagaaaagaaggggcacctgctgggctataaatgattatactgtactcctcagattgtgattgctacccctgggcgtttgattgatgtgctggagaaccgctacctggtgctgagccgctgtacctatgtggttctggatgaggcagataggatgattgacatgggctttgagccagatgtccagaagatcctggagcacatgcctgtcagcaaccagaagccagacacggatgaggctgaggaccctgagaagatgctggccaactttgagtcgggaaaacataagtaccgccaagtaaggctgcttccctgggctgggaaaagttggacaggccaaggcgggtggatcacttgagctcaggagtttgagaccagcctgggcaacatggcgaaactccgtctctacaaaaatttaaaaaattagctgggcattggtggtgcacacctgtggtgccagccactcaggaggctgaggtgggaggacctcttaagcctgggaggcagtggtcgcagtgagctgaggtcgtgccactactccattccatcctgggcaacagagtgaggccctgtctcaaaaaaaaagaaaagttgtacaaggttgccaacctcctkttgggcctttcttgccttaggtgggctcagagtacatgtttctagaatgaagtgtgcctaggtacagtcctctgacagtcctaagggtggagccatttagcttagccctggaaaaacgattccaaagactcatgctgctaccgggaccacaggtgctagcaaatgctctcaatccttcctgtcatcataagatggaaagtgccttgatgagcaggtactcaggaaggatgggaattcagaggacactattttctaaggtggtggctatcaaagcctatactgtggcccattttagattctttagtctgggctgacctgccttcggtgacagtgggatatatgattattcctgcctgggtgcagggctgagcctcctgttttcgtagacagtcatgttcacggccaccatgcccccagcggtggagcgtctggccaggagctatcttcggcgacctgctgtggtgtacattggctccgcaggcaagccccatgagcgtgtggaacagaaggtcttcctcatgtcagagtcagaaaagaggtatgagggcagctgagccaggggaaacagggtggagaataaaatggctctgagaacttttttagtgcaggtgcagggcagggcarttgctctgctgtgttgaagagctgctgttttcttgggcagaatgtcatgggcattaaagaccctgaaagtagtrttcatagatgagggttgggcrtttcacttggagtgggaggtattatgcatcttgtttttctcctcttccttccaggaaaaagctgctggcaatcttggagcaaggctttgacccacccatcattatttttgtcaaccagaagaagggctgcgacgtgttggccaaatccctggagaagatgggggtgtgtctggcaggggagaacaaagtctagcctctgtggcactgctttctgaatctagcagggccccctaggctcttcctttcaagtctcaccctttctttavcctgtccagcaatcaacaagttaggaccagggtgaagggtggtttgagggaataaagagaatggaatcaattgctgggaccccctgtctgctgcagtaatgccagccaaagctgccttgggtcttcatcctggtgaggtggagccagggaaaggtttgagacccatatcctggcagtctgaggatgtagaaaagagtaggtgaaaactgcttaggtacgttgagaggaggtgatatggtcagaagggagctgataatcagtgtcctttactcctgtcactggtgcttgaggggaggggtgtgtccctgtcactcagctctccaacttccttaaacttcttgatccctgctttctaccctgatctcgcccctaattctctttgaggacttttcatctgtctggctccaccgctctcccagctgttttgcctttgaccttactctgtgtgtccctgccacaccacacctttttctctcatccctctcttcagctcacttgttctctccttctttcactgcaatcattctcttgtttcctttcctttctcgtactctgctgctctctccaaccctcccttcatctgtgtcccattcctctgaactcctgtgtctctccttgattgcattgctcactcttcacttcaccattcttccaacagtacaatgcttgcacactgcacggtggaaaaggccaggagcagcgagagtttgcgttgtccaacctcaaggctggggccaaggatattttggtggctacagatgtggctggtcgtggtattgacatccaagatgtgtctatggttgtcaactatgatatggccaaaaatattgaaggtaagttccagggaaagcagcttcaatccagggtgaagtcagattccttayggtgtcccactggaagtcagggtgctgtccatggaaggctgttactgcctccctcagttccaagtctgggattgcttgctcccatgagaagcactcctgtcctttatcttacctgggtttgttgtcccagcagctgggatgacacttgtgtcctcaggagtgtgaagaatgaagctaggcagctgtgggtcttagtgtggtagggaccacagtcagtaggaggacaggggagatgggcacctggagagggcactgtgggcgcctcaggttcaggcagcatgtgctgtattcctgcctttggagatggggtgggaaggatgcctctagaagtggaggcatcagacacggctccccagggcatctgggctatgctgagtgacgttcttcccattccccagattacatccaccgcattggccgcacgggacgagcaggcaagagtggggtggccatcaccttcctcacaaaagaggactctgctgtgttctacgagctgaagcaagctatcctggaaagcccagtgtcttcctgtccccccgaactagccaaccacccagatgcccagcataagccaggcaccatcctcaccaagaagcgccgggaagagaccatctttgcctgacacagcactcttcctgtgggctgagggcatctccaaagctgcctgatgcctgtttttcagaaccctcacatccctctttccaggtcctcactcttgggatatgggggcttaggaaaacaatccaactccctagcccagaccctcaggtcaggaggcctgcgtgtggggctgcaaaaggagaggacgacgctgtcggaggcagggagagcaaattaccacagcttcttggcccagttctgcccttctttgctttgggattgcactgggccatcagctcatgccaggctatgggggcagccagttggcattgctccccagactgaacagaaacctggccgccggatgggacctcctttggcacagacttgactgtgtaactgcataaactgcagtagcatcattgccctagatgccccaggagacctggcaccatgaggattacagacagtggaatcttactgtcatctggacagctgttttcctktttggatggtaaaggaagttgagagtctttagacctgtgcacagccccrcaccaaggggtgctgtatgctctaggcatcccctcccccaggggattttctaagtagatggggggacacggtgaactggctgtgtccatctttgtcactgagtgaaatctctgttttctattctctgagaagataagtttgtatgttctgagaataaatacatgaatattaagactgytagatctagttctagttaaacttcccagcttctccctggcaggagggacaccactgggtgcggggtgggttggcttggaaaatgagagacagccacattaagagaagagtagaggggtctctgctgatagtcttgagtctgtaggtggacttgagaggagatgcagaagccacgcaggactgtaatgcatcttccgcccctgctctagcctcgcgtaatgtgtggccctggcctggacaccctctagggagctttaggcaaaggtgagaaaggaaagcagttgtgaaattttggcaggtgaggcagttggaaccactctgccgctgtgtgcccaacgcctggtctcgggagctttgcttgtggctccctagttggacccattgctcctgggaggggatggtgcagaacgggtggacccagctgtatcaggctgtggtgagaggaacgcagggctgcagtcctccccccatacccctcttgttcacatgctcttcttaccccacagaaagagttggcctagtacatagagttcaagttgtagctgcttctagggcctttttggcctggcgcaaggatactgtaaagccgtgaccaagcgtcttccccacatcccaggacaagcccttccgtgctgctggatgtctccctcttgacacctgggcatgaggagtggggatgcctgggagtggagtgcctccccagctctgcctttgtccccttcccgctggacagatcctctgagagaagggcggcccaaacacatctttccctccaccagactttgggccgcatcacagacagaacagaagccggagggactgtgcatgatgtttattagtgatgacagtgaggtgaggcaggggcttgtggagcatgctctgtaggtcacacactagagccataaggcaagagtagccggggagacaggtcctctgtgccctgtctctccccatctaaccctaacctaacaagcggcagctatgagtcagggaacaaagtctggagcccggttctccaaagatgtatgagggacaagaacagaaatgacaggatgcagggcaaaagaatgagaaaggcaaggaggcccccctaagttctctgctacacatgccctccttccccaaacccccatccaggttggctcccatctgccacttggcttcaccatgctcctggtccctggtcctgtcacatgttaagaagcttcctggcagggtgaggagagcccttccctccaagagcttcagctgtgagctctctctggcccgagcgtggccagcctgctgctccagtcttggatgtggctgccacaccccagcaaacggatgggtgtgccaccctgggggggctttgattgtctcatttctaatgtatggcagtgaggtgactggaggccctggatgccaaagcagtcccttgactgtcaggacttgtgcctgctcagggaccttgtttcttcctcatgccatggtgcccacaccccacccttttgtcactttaatggggcatcccttccctgagtctggtgggaaggaccctgctaaggggatcctggcctgagggcactgcccagtggggcagcttcctgtgtgggaggagaggaaggtgccaggggtgcagaacacacagctagtacctggaatgggagcctagtaggggtcactgcccaggaggtgagggggtcccctgtttctcccagaaccttgggaccacaggcagccctgaagctggggctgggcagggggttttgggggctgagcctagtgccagcctgatgccagtctaacgccaccctgcctggagtgggccccccagccagctgcgcctgtgcctgccagggtagggcagcaggaggctgtcagtagctatccttgggccaaggccggttgcgctgccagttccggtcactgtggttgtgytctgagtcctgggctagaagccggtcttgggggtcatgcccgttagcactaggcagccccgaggtgtgttggcggtgaggctggtacaggtcctggtaggcatctgcrtagtcctcctccaggtggygggagctacgctgtgaagatcctgtccaggcttggcgggagctctcgctggcctcatcagagggcatcaagctgtcccgctcaaggggggagtgctcctcgccacgctcccccagcagctgctggttctgggggccatacaacagctctcagtgaggcagtacagacctcaccttgtcttctggtgaggtgcgagattcttcccccctcaactctcaattccccggtaaaggaaatagtgcaaggaaaaagcatgctggagcatttttcctcttccgagagagaaaactggagcttcgactcccgcaaaattcaggctctgccttcaaggcagcctgggagaaggtttggagattgtgtttctcttgacccctaggaaactaatctctgacgtatccatctcattgattgattccctctctcctcaggaagttcctttgcccgtctgtgctagctctgtacagcagagctgagagttctacaatcctttggcatgctgaactggaggccaaggacagtcctctgggcagggaggggcagtgccttggctggcttagcttgagcatctctgcccactggaaatggttacctgaagtccggggatggcactgggaggacccagaagtccggggccaggggctgggtggtgcgtggcccgccagtaaacctccaggtactcagccaggtgctcacaggcatcctccagctggttctcatccagaatcacatcaaatgactcctggggagggggaggaaggcgcaacgttggtttcccctcagtagcagccccccacccatctctatcactgccgcagccctgggggagtgggcacaggagcagctgacccaggcactcaccggtgggcactgaaccagcttatcatatgccatcatctgtacggtcaggtgcttcatctgtgacttcccccgggagcgaatgagacgctggagtacctgagcggggagggcagagctaggcctggagtctctcaggactctgggcagagctgagcccgggcagagctaggcatttcttccacttgtggcatcagtagcaggtgaggatgactcagagttgtgttaagggcagcaggaaaagggaactcaggtgccccaggcagggaccaagtagaatcatgccacattctagtaggatagccctgtgggcctcctccatgagcccagctgacttacctttggtgaggacactttgacaaagacgatgatgggggccagcgaggtcttggccagctgtgctgggtggttgatggtgtcagcgtccaacactactagctgcagggatttggccagctcaaatatgcgctcgatctcactctgcacttccgctatggagggaggcagcagcagtgctcaccaggagctctgcccactgctcactccagcaggctttgagggctcccgaatggtggacaggaaggaattggaggaaaagggcattcatcgaagcctggacaggcagaggaatgggaattgaggaggaggggtgtgttcttgccaatcctgggggcaggtagaggagttgggcagaaagacaaggaggtaaggaagagaaaagggaagaggggccaggcatggtggctcatgcctgtaatcccagcattttgagaggccaaggtgggccgatcacttgaggtcaggagttcgagaccagcctggccaacatggtgaaaccccacgtctactaaaaatgcaaaaattagctgggcgtggtgatgggcgcctgtagtcccggctactcaggaggctgagatgggaagatcgcttgaacccaggaggtggaggttgcagtgagccgagatctcaccactgcactccagcctaggtgacagagcgagactccatctcaaaaaaaagaaaagggaggaggaaggttctcactggcacttgagtgggcacagaagcaggtggtggggacttctcaccaatgctggagcgggcagaggagcgctcaatgatggtcctcttgcccggattgttgagcacagatcgctttgccagggagaggtcggctgtgactcgggtgatggagatcctggggtgggagtggagaatcacagcttgcttctaaacctgtgcctcagcctctccttactcagctcccactaactcttcccttagagaagactagctacaggcatctggaagtaggccatgagcttctccttggttctcaggccacctcaggccasggcagcttacctgccatcaaatctgtgtttgaggaagtcgaagagagccttctgcatcatgtctgtgacctgggggaaggcatggcactgatgaagggcccctttggagagaagcagcctccccatgcatggccccagagtcaatgcgctccacatacacaccctggacggaggagacacaccccttccactttccctagggacttcctgtggcaggcttggtagaggtgactctttggggtcaaggacctcctctcacctcataacctttcagagagggtcccaccagcaccacaggccgcatggagggcaccacgtcatatgggggaacatgttccgcctgcagaatggacatgaggtcagtagaaaccatggccctggtgcctgtctcatgcctggttggcgtcagggcagatccagaggttctgggctccctcccctctctgttctgccctccaacaatgactgcctagaacactgtccccagagccataagccatgatccccccagcccaggtcccttccttgactcacctgcttttgcttctgcttggctttttggaaaaggaaatacaagattaaagttggtgaagggggaaaggtccctgggggcatggtatccccgtccccaggggagatactggcttctccccaccccttccaatccctccacaaacccttcccacacagttcacttgggcaggatcccctctttccctgtgtcttagctacccacctayccaaaatgggtgggttggggggaggctacctagagatggcggaggggagcgtcggttgccaatgtcactcaggctggaagggttcccagatctcctgagaagaaagggaggtgaaagagagagagagaagaatgtgtctctgtgtatgtatgttctatgcattatttaataattgtacacaattccatatgctttatctagtgagacaggtgtacatgcaatatgtgtgtgtgtttgtagatttgtttagtgttgagtgtgtagagctgggcatacgtgtatgtgtatttcagggggatatgcatgtgtatggcatgcatggtgacgtgtcctgtgggtacagtgcaagtgtttggggtgtgtttactgactcayggcccaactctcacctggccttctgctcctgtttgagccggatgctctccaggcgctgggggctggggatgaaggcgatgtccccgccctctttcactagccgcccgatccaccagtcattgctgtacttctgggggcaggtggagcaggaaggggtggtgagagaagcgccccgccccagtcctggctcttcaatgtgaaggagccagcgaggcagtcactgagctggtctgaggaatgcaatgcaaggggcggtgggcagaaggggccaggggaaaggacagccaagttcgggccacccaggatttctgagtgaggcattgcagctgtcacaggggacctcggaggcagctaatctaactgctcacttgacagacatggagactgatgcccaagccaggtctcagaaggatggagaccctggggatgagatcttagatatgaggggtggacaggtgtgtgttaaggagaagagctgattagcttggggaattagactgaggattcaagtcagaagcattaggatctggagcaagagcaagaaaatgaagttagaggcttctggaagtaggggggtcgatcacctctttaatgtgcagaaaatctttggcctcaaagttgactccagagccctgga

SEQ ID NO: 95303 - DNA, 22934 bp, Homo sapiens
cccggacattctcaggagttgggggagggtacaaaggtaccttaattgtcttggtgccaggctgtgtcctggtaggtccaaagtccagctgctgctggatcaagagagctaagaggcggggagctgcgtgcataaaacaagtaccttattcacatttagcactgggaatgtcgtcagcttcatactctccaacacaatggatcctaaacttcggcatgcctcaggattagctatttcatcagcttgttaaaatgctgggccccaccccctaattttcttaatcctaccccttgactttctgggcctcatcccctgactttctgggccccacagcctgattttctgattcagtaggtccaacaaactcccaggtaaatgcccatgctgctgggctaggacgacacgtggagaacaattgctctaaaaattgagcagatcaacactctctttcaagtctgcacctggcccagcaccatggggatccccacagtacccccaaaaagtcctcagaatgagtacacagggcaggcagaatggcactctgactgtagcataatgatttgtaaatgcaaaacaggtcaagtcctgtctcaagtgttttcagattgaaaatgcggagggggaaatgatggggtccttgaagtcagagcttggatcatgggtttttccccaccaggccccagcctaaacaagctctgttataaaggagccctcgtctttgtggaaggaggcgttttttgtttttttttcttcaagatggagccttgctctgtcatccaggctgaagtgcagtggcgccatctcggctcactgcaacctctgcctcccgggttcaaatgattctccttcctcagccttctgagtagctaggattacaggcaagtgtcaccatgcccgtctaatttttgtatttttagtagagatggagtttcaccgtgttggtcagggtggtcttcaacttctgaacttgtgatccaccagcctctgcttcccaaagtgttgggattacaggcgtgagccaccgcacctggcctaggagggaatatttttattcaatccaggggcagcctctgggtagaagggaagggctgacttggttcagcaaggtcaagagccttgccaaaagtcacacagctagcagaagttggagggtgagtttagtggtttccctaagaaagaaggggtatgggtattaccatccacagtcaagatgacagtgtgagaccacccttactgaatacctgggacatcaagtttttttacttagcaatttttttatgataaatgtaagtatagatggtccctgacctacaatggctcaatttaacatttttcaactttacaatagtgcaaaagcaatacacatttagtagaaaccttacttcaagtgtccatacattctgttttttattttcagtacagtcgtgaataaattatgtgacatgttcagtactttattataacatttgtgttagatgattttgcccaactgtaggccaatgtaaatgttgtaagtacatctaaggtatgtcaggctaagctatagacgtttggtaggttagatgtattaagtgcattttcaacttgtgaattatagtgggtttatccggacatggcctcattgttaagtcacagagcatctgttaatatggacatcttaaaaagacgtcattaaatgaacgcaatggagtctaaatatcataatgatttgatacaaatattattcattttcatttatttattttttgtagaggtggggtctcactatgttgcccaggctggagggtaacacaatcatagtgcactgtggtctcaaactcctgcccttctcaagtgatcctcccacctcagcctccaaagtagctgggactacaggcatgtgccaccttgcctagcttctttatttatttattgagacagagtcttgcactgttgcccaggctggagggcagtggtgcaatcttggctcgctgcaacctctatctccggggtgcaggagattctcatgcctcagcctcctgagtagctgggattataggtgcccacgaccatacctaggtaatttttgtcttttagtagagacaggatttcaccatgttggccaggctggtctcaaacttgagacctcaggtgattcacccgccttggcctcccaaagtgttggaattacaggcgtgagccacagcgcccggccttcatttttaaagtacatgaaaaaactatttatgacaatgttgagttttacctaagcactgtgctcctagagaacagcaatgattaaccccttaccccctaaccccacctcaaccccgtctctcgggttctggaaatggctcactgcaatgactgagataaaactcatggattcccctctatggcgattccccactataccctgttactagaccggatacagatagccccaattcccatttgcctcataagtgactagmtgaaatgcttggcccattgatcagctggaaaaaaaatgctcattaatgaaactttggttaagcttttgtccttccccaaggcctctgaattttggcccaccctcagcctaaaccagcatgaaatccctctgtaacagcccccttgagaacaggctggcctcaggataaagcaatctctgatctactgccccaccctgtcactctcgttcatcccacttgcctacaccaggttctttctagactggtttactccttcctataaaagaaaatccctttttacctaccccttgagagtttgtagatttatggcctgagtgttctccctgtttacagagtcttaccaccctcaccccaccccaaaatcatccttttaaataaaatctctctttatcaaatctgggtctgtttttttatttgacataatatgcaacattctttttttcttcttcagcttctgctacggagttttatccaagcataatatattttcatgcttggtaatattttatgaagcaccctattgtacatttctgtcacacaattatgcagataaatttgaacttgttaactctaaaaaattttctgtgaccatgaggttctaagggttaattttttttccttctagattgaaatgttgttgtaattattagtagtacatatgattaaaatacatgcatagcatttcattatatgagagaatctttaaacatacaagttaattaatcttcattaaaatgtcatggaaaatatatctttgaaggagatggattgagccagttatttttccataaatttgtgagtccagagatgagtatcactttttgtaagaatgagacagaggtgagtctgttgttttgattttatagttgtaagcctgataaacattgtttacattaaaaccatagagaaatgggaagggttttagtctggcaattctcccacttcttttaaattcctgataattatctatactcatgtatttatttatttattcatttatttgtttactggagacagggtctgtctggctctgtcacccaggctggagtgcagtggctcaatcatagctcactgtaacctctaactcctggactcaagggatcctcccacttcagcctccccagtagttgggactgtaggcacacacctccacatttatttatttttgtgaagacaggatcttgctatgttgcccatgctggtctcaaactcctggcctcaagcagtcctccagccttggtctcaagaaaatgtttttaatgacctaacaacatgattagatcctccttggatcttggtgaaagcaaagaatcagaaaccacctgacttgtagaaggatttcttgccccgtcctcaacaataattaatacattatttagaattgccctattgtttctcctggagacttttatttcccaaggtaatgcagcagagcaagatttagaacaggtgcagtgtgaattgcctttgaaaagtgggagacagctggttacacatgaggagagggaagctgaaccccaaagaccccaggcatattctgaggcccagcaccatggaagcagaggatctggatattgactctcttaaaactctccttggttgggtgtggtggctcacgcctgtaatcccagcactttgagaggccaaggtgggtggatcacgaggtcgggagttcgagaccagcctgaccaacatggtgaaaccccatctctactaaaaatacaaaaattagctgggcatggtggcacgtgcctgtaatcccagctgttcctgaggctgaggcaggaaaattacttgaacccgggaggcacatgttgcagtgagccgagattgtgccactgcattccagcctgggtgacagagtgagactccatctcaaaaacaaaaacaaacaaaacaaaaaaaactctccttgccccagatttacctcccacagtccccatgcctgaacaccgctgtcctataaccccttcccctctgctctctgatcaacgctgcctcctaagtagcatttgaatctgtcatttcaaatgctacttaggtggggagctctttatcctccacaccactctggacatcatgatcttccaaatttccacaaacactcccccactcctttctccagtcctcatccattcctctctatgctgcagccagaacaagttttttcaaatgcagattcactggtaaactatctatggcttaaatccctctgcctccccaaagccttcaggggcctgggtaaaaggattgatctctcttgtgacctcatcccttgtcctgcttccctcaaatttgtactcccatcagaaagagctcctagcttatttctcatcacaggtacgtttccaaatcacttctgcttgcaaaatgtgaactaagagaagtcagactgcttaggtaaggatctttggactctaggtgtttctccttaatttaagtgtcaatttccttaactgtaaaactgaaataatagtaaggtcattgtacaaattaactgagtattttgcctggcacatcattcgtgctcacataatacgtgtgaactgtttattattgttcttgttattactcatgttacactgaattttctttctttctttctttctttttttttgagacggagttttgctcttggtgcccaggctggatggagtgcaatggcgcgatctcggctcactgcaacctccgccttctgggctcaagcgattctcctgcctcagcctcccgagtagctgggattacaggctcccgtcaacgcccggctaatttttgtatttttggcagagatggggtttcatgttggtcaggctggtctcaaactcctgacctcaggtgatcacctgcctcggcctcccaaagtgctgggattacagtcgtgagccaccgcgccccggcctcatgttgcactgaattttctgttaaccttgctgtttccctgctgttagataaacaactcaggatgcttatgtgtttattgtgtgcatcccactgccaagcccacgtaggaacttaatacttaggagtcaagtgttgcaaaagaataaatgaaaaagcagcgctgacggaggaaacctgactttcaaagtctctctttagtgcctactgtgtatattatttccttgaatcccagaacacccgaggaggtaagggccgatgttcccaatctgcagatgtgggtgtactcagttaagtcattcggcctttggtggtaccaggcttacaggagcccacatcccgacccaggtagaggagtggattggagccggggaacactgatgggaccgggcagggacgacaggaggtcagtctcccttcccttctctttaaaatttcccgccagtatggccggctcgcagcacgagttacgccctcttcaggagtccctccccttctgctctcgcccgcctccccgctgccaggcaggctcgaccaatcagaagaggtcttgggcgggcgctgccgtccagcgagccaataggcgggcagtcggagccgggcttgcccgggcatgtgggagctgccggctttccggacgccacgtgcagaccggaagagacacgcggggcttcaggtgagatccaggaccctgcaccggggcggcggggtcgggcgggctgaggccgcgtgtcccgggtcgcaggtccccgcgcgttgtttccgccccggcctgcggcggggacgcctgaactgggctgaccctgccctaccggcccgcagaaaagcaggccgggcgccgcctgtctccagccctcgctctgctcgggggtccagggccagagggggcggcgctggtcgttgggactcggcccagctgccgcggccagcaagtgatcaacgcccgagtccttcccggtgagatcaggcctcccacgcgtcacgcctgggagaacgccagccggcggggaggtcgtgccaggatagcagactttagttgttgtcgttgttccgtggactttttagcagcacaggggaccttatcgagccaggtwttttcaggtttgggcgattatcagaattgtggcttgagggtaggggtcgtccgcgctctttttaaaaatctagattctcaggcccctttccccaaaatagcaattaggacggtgtgggagtgggcctgaaaatcagcctttcatcagatgtcatatggtaattaactacatttgggaagcccttatctaattcacagccctcggttgatggtgaagagacgtgacttgccccagatcatctagctacttagtgccagaggagggtctagaactgccctctgccctcttgatcagccagcaggttggtggctctcatgccaccgaggattctgacttcttggttcctttggggcctttgctccattgactctgcagctgggaccctttctttaggccagaccccctccctgcctgaaggccgggtgtctgacccccagagcgctgggtccaggctagagaaaggcttgtgtttgtccttgttgaaagggttgttttatctgagcggaacttctctccagcttcactgagctacatttgggtccccaaagaggtgtgtccttgatgactgttggttttgacgtgtcagcatgtagcaggaggagccgcggacaaaaccccacagaggtagtgaaggaattggcttttaatcagctggaagcatcggcagactagcatctcaaaatccgagcttgttgagtgcacagtttctgtcccttttaaggactcacaacactaaagattttacaagaaagggccatgattgattgagcaatctagggggtatgtgacagggactgcatgcaccggtagtcagagtgaaacagaacagaacagaacaagagatttcacagtgtccttctatacaatgtctgaaatctatggataacatcggttgctaggtcatgggtttaattttaactatcaggctaaggtcaggcaggcccaggcctggttttgggtctggttttgggtctggtgcgtggcgccgggctgcctgcctttggttttgcttccttgtttcttcttaaaacaggtactgagtataaaataatacagaacaatatgagggggaggtctctttctctcttctcttaagcaaggtcagggtgtttggaaaaggactactttcctctcttgaaataggaggctacagagaccttttctcagataacttaatttctggcttctttaaaaccttgccagtaggatcaggaaagccacccaccctactcctagcctcagcccctcacagagaaaggaggggactatccgccagccccctttcccaaattagttattagcagggtgggcattgggcttcttaggcttttttctcccattgctgggctgaggcagattaaggttctgaatttgtcagttctaagatgtgactgtcaatatgaggaagttggttacagttaagacctttttaaaagagagaccttttctcctggaaaggatgggatgagcaagcagggtggatgagtcaggatgggtcaggtctggatgagtcaagtcaggatgcggtgccctgccctagagtgtggggattctttatgcaaatgctggcatcatcaaacctggcatttcacctcacctcccatccccttcccatttctcttaatctctgctgctactgctcaggttttcatcttctccagacctctttctacacccttctgaagaggacctgccacatgctagcttctaggctggctgttggggaaggkacaatcaaggctctaacctgccttcttacagctctgaggtagactgtgtgtaccaatggactttgaagggtgtaataattctcaaattgtgctataagagctcagcacagagggatgaatttctttgctccccagctagacttagtgtcctgagtcagggctactgtgggatatttcagtgacctccataggtgcctctggggctcccccactcacttggccagtagagaccaattcaggggacaccagattgcggtaggggtggcttgtggaagggccaccagagtaggaaacagaagatgaaatggtgcaaaggagagaggagcgaggagcagtgcctccagcatgacccgccttatgctctacaccccagtgacttgaggctgctggtgggccctcttcctccaccctgggttagtcctttttaaggcctttgcccctaacatggccactgattcttctcccttcwacctggaaggttactgttgtacatgcacacagatgtagcctcttccaggaagcctccagagaattgtcctccagcctgttttgcctccctagcacctctgcttcagcccttaacacactttatgcttggtttctgtctccaccatgaaactaaacttcttggagtccaggatccacctgtgcagccgcccagcatctggcacagtggagacccgagagagcctcagtatggcattggcctgtgcaacccagtgggacagagtttcttccagaagggcttctgggtggtggcggaacagtagctgagtctgaaagagcaggagggctgtgagtgggaagggaggctgtggcttgggaaagggcagtgagtccaggcggaggctgctctggcctgagaagagctggctgccaaccacgggctagagtctaacctctctgggagaaggagcagtggttattgagcccctactgttcagaatacaggaagaccccagcatacattgtgtcgtttcctcttcacacagtagagggggtggtaggatcattttacatgcctgaaaactgaaacttagcagtttaggtcatttacaaagagctgagttaggccgaatatggtggcccacgcctgtaatcccagcactttcggaggccaaggcaggtggatcacctgaggtcaggagtttgagaccagcctgtccaacatggcaaaacgccacctctattaaaaatacaaaaattagccaggcgtggtggtgcatgcctgtaatccagctacacaggaggctgaggcaggagaatcgcttgaagccgggaggcggaggttgcagtgagccgagatcacggcactgcactctagcctgggtaacgagaacgaaactccgcctcaaaaaaaaaaaaatgccaagttaaaccctgctctgcctgacttcaaagccctagtttgtttgatctgttaaaaatgtactgactgacttggcataacaaatgagacaggctttccaagttatggcctcagctgttgggaagatgctgggttttgcaaactcacatgaacatcagacatttcctgtagcagcaatgaacgacagcacctcttatcctagcattcagtgacgagggcttaaagtccgctgggtgggagcccatcacagaaatctgcaagcacttcagatcaggacttttaaatgtttctagatgctgtggcgattaatgaattacaacgtcaggtaaagaaattacacttaaaggctggacaccgtggctcatacttataatcccagtactttgggaggccgaagtgggcggatcacttgagcccagtttaagaccagcagggcaacatgatgaaaccccatctctactaaaaatacaaaaaaagtagccaggtgtggttgtgtgtacctgtagtcccagctacccaggagrctgaggtgggaggatcacttgagccctgcagtgagctgtgatcacgccactgcacttcagcctgggtgacagagcaagaacttatctcaaaataaataaattaattaaataaataaattacagttggttatcatattacaaaaaaatacaactattcagttactgcgggcttcctatgaaattctttctccaggttgtgctgaggatctgtgccttcatatttcaaaaaagtatttcttaaaaaaggctatacagtttctataacctttattttcctataaccatacctctgtcaaagtctgatgcttcttagctaaaaatcacagcagaaaaaaagtccactgctaacaatattggactcagccatggtttgaggttgagggtgtggattctgggttcctaccagcctttggcttttactaatggggcaagtttcttcacctctgtgcctcagtttcttacctgtaaaatgaagatgataatactttgttcaggtcattgagcagactgagtgattccatgtagtatttacaacagtgattcacctgtgtttacagtatgaatgcttttattagtgaaatgggtcctcaactcaatctgggagccacgagctacggtgcagggctctsgggcatccccaccgtggtgcactgcagggagggagggagggtgggtgggctgcctggcacactctcacccagcccctctgcctgtgtgttctctcttcaggctgctgccccattggaagattactccccaggcttcccttgccccaagcagtgagctgactggaatggtaccccgggaggcccctgagtctgctcagtgcctgtgccyttccctcaccatcccaaatgccaaggatgtgcttcggaagaggcacaagagaaggagccgacagcaccagcggttcatggcccggaaggccttgctgcaggagcaggggctgctgagcatgcctccagarccagggtcctccccactgcccacccctttcggggcrgcracagcaactgaagctgccagcagtgggaagcagtgtctgagggctggatstggcagtgccccatgcagcagaaggcctgctcccgggaaagcctcagggcccttgcccagcaagtgtgtggctatcgactgtgagatggtgggcacgggaccccgagggcgggtaagcgagctggcccgctgttccattgtgagctaccatggcratgtcctctatgacaagtacatyaggcctgagatgcccatcgctgactaccgtacccgctggagtggcatcactcggcagcacatgcgcaaggctgtccccttccaggtggcccagaaagaggtaagggcagggatggggacttgtttgggaggtgtggtgggctggaaagagccaccctgggtttgaatcaccacttygcttcactgggggcaagaaaccttgggaaagtcacctaactgctccaaacagtaggttccttctccatagaacagggraaataaaaataaaatcctgaccttgcctccagataaggattgctggcctgttgcacaggacaatgtagaaaggctacaccaactgtaaggtgataaatagcttacattttagagtttgctttctgttataaaagttgtacgcattgatataaaatttgtaaagcccacagtggcatcacgttcaggtatggatgttttggcatatttccttatgttagtttcttagtgcttagaaaaaatkaattagtggttgggaccacactgatgcaccaggaattcccaaacatgcttgaccttagaaacacctaagtcctttttaacaatctaggatccttgtccccagttccctccatagagttcctgatccattaggcttggggagggctctgacccatgttccaaaaaatcatcacactgtgtagacttgcaccataaagccacagggcttaaggggaaatggagaaagggaacagtattaaaaaggccatcagtgacaccccaaaaataagatagaaacctaataaaaaggtagtccagttttacgcatcttgtttctttttttttttttttttattccacacatcttaaatggttaagaaatgcacaatacaccaataagtatggcactttaccttgaaaaagacctgaacttgcttgtggaaagaggagtcagaaaggttgcagcttgagtttctgtgaagtggttgaaggagagttctttgaagtcagacaggaagtgtgacaccagctgtggatgggtgtggctcatcacacaggtgaactagggttgctgggagatgtttgggctgtgtgcatattgtgtatgccctcttggcttagttcagttggatgcagttttctgcgttcattcagtgtttctcaaggatgaaattatgcacaagcaaaggtgaaatttgcattgttctcaaaatgtgtcatacatcaattgcattgagacaaatctgcattttctaaacaagccttgtaacagaaccactttttaacacttctgggttattcttgggattaggcaaggttgggaaatactggtgtacactatctcgtgtcctactttttcacataacattgtggcccgagcattcctttgaaatgatcggaggttattttatgtatcaagcaggccaatcagtaagagtagcaacaagaggggaggtgtgtggtgaaccctccagctccttggtcccttccattgacctggttggtggtggtcccaagagcaggaccactttttgtctgcccagactccgagccactgtgggttgtgcttcatctctttccacttcatggctgacttggggggaggggcagtgtggtgagtgaccagcatggtggcatgtccctactataaagtctcaatgcatcttatccatctgccatgaaagctgggtttggggataaacatatgttgccagcagaggtaggctgtggaggcccgcagctggtgataaggagagcccaagcccagctaagagggctagagggggttgctggcccatggccctgggcgtggcctccctggtgtatgaggagggccacccagcagggaagggaggtacacattgtgcrggcagccagagctgagcaagagagcaggttaagaggatgaggaggagttggtacacagcagggcaagggggcagagtcctgaagacagggattatggcccttaatgctcataagagctgctgctatggtgtgtctaccagtgacaggcacggttctgttgacttcaccyagctggtctttattgatcacctcctgtgataagtaaataatcaataaatgtaatgctttctactacaggaaaaagataggcattamaaaaaaagaataaatgtgacgctttccttggagcatcactaagaagtccaacatggtccctgcactcacagaccytacagtgcggtgggggagagttgggtggagtgggaggcctggtgacgtcttccaggctgagaggagagccaacaccagcaatagagttgcttgtatctggtaacaggaagacttccatccatgacctcgtttagtccttagagccaccccacggaatgctgctggcagtgtttccctttgacaggtgcagaagacataggtatgcccctgggtatagacagtagaagggtctgggttcagacttggggcagcatggttgactgtggagctcgtgatctccccactcggtgctgcctcccyccacagggatccatgcatctattggccaggggttctcagggcgtgtctcctgccaacctgatggggtgtggggtgacctccctgactcctctttctgctcacagatccttaagctcctgaagggcaaggtggtggtggggcacgcgctgcacaacgacttccaggcgctcaagtatgtccaccctcggagccagacccgggatacsacctatgtcccaaacttcctcagcgagcccggcctccacacccgggcccgggtctctctaaaggacctggccctgcagctgctgcacaagaagatccaggtgcgtggtgggagagtggctggaagggagggaggcccgcctggcctccatgccacctgagccacagacaaggctttgggcygtgtctccagcctccttgtcattctcttccctagtccaggtccagggaccttgcttaaatgggtctccctcctgtacacgcagctccaggtgtttctctccatgatccttcttccccagtgtgtactgcgattctcccagaacacattctcctaggccgatctcttccagatctgtcccctccctaactcttggttcttgcatccctgaagcatggtctcccatcccctactagcagacatagagccttagatcaggaggagccagtacctcttgctcctgttgggcttcacatttattattcatctgatctgcaagcctttgaagcaagagatttttagcatgccttatatttgaggaaaacaggcttggagaagctgcatggcttatggtgtacmgttgaggttccatcccttttctgtgaacctccattctgagcataygtattcttgggcctgcacaaagagccctgggaaactggccttgcttcttggggtaacaggcctctcactaggcctgcaggcagtgatgtgttggctctcgtcagtaggtgggccagcacgggcactcatcagtagaagatgccacgacagccatggagctctaccggctggtggaggtgcagtgggaacagcaggaggcccgcagcctctggacctgccccgaggacagagaacctgacagcagcacagacatggaacagtacatggaggaccagtactggcccgatgacctggcccacggcagcagaggaggagccagggaggcacaggacagaaggaattgagaagggggcggggctccctggctgggcttcyggtgtggccggtaggaagtgggggccaggagagcagcgggcactccttcctgggcagggtggggcaggatgcagtgagccagccccagggccagaggagtwggggtcatctgttaccttgacaccctctgcacacagcatagccctctctctctccagggctgttggttctttctyctgactcctgtggttttgctaatggcactttacagactccatggagatgtcaggtggaccatcttctagggcccagcaggagtagggaatgtgccaacagactgcccaggttgccgtggccttccccaccccccagatctcctgagtcatcatgctgtgctaatgaaagggatcatatcatcctctctggggatggtgggtgggggtgtcaatatcctggagctcccttaccccaactcaatgacttgggggtaaagttctcttccttttgttgcctacctcttcctccactcatttgggttcagaataaacatgycctgaagttaaagaggagttaagtcctaaaggaggcatttcttccccacctccctgacctggaactctggctacagccattgtaggaactccgtgcctggcctgtcagctccctgctaggctacagtggaatagcagagcccacaggcttctcgtggggagttggctccttaacatttcttggcaacagaaagccccaggcacagctcagggaggagggaaggcaggtaagctttggacgagaactggcatatttattttgacccaaatcagggatttccccagtccacccagtactgggctcttaagcaaaagtctgagaaacaagacagtggtttgaattctggggcctttgtgtaggattgtgcctgacctttatttatttattaacagcagggccactcgtctagggcagtggagtctgcgtgtctcctggggctggggcagggcattggcagttatgcagtggccctgaacctggtctggtgcccccgaacctggtctgatgccccctcagctctttgacaatcactgtggctgttgggttttctcctatttctaaaaatgttctcttctttcctaagtgacagttttgaagtattggataaccaagagctcaggtcacacagaccttggagccccatctttgcttgcagcttagctttgagatactaagcaagcgagggacttcactcttgagsctgttttttcctcatctgtaaagtggggatagtggtacggcctacctcatagggttgtaatgagcactaaatgtgaagtgcttggcacagtgcctggcacatggtgagccacagctactgtgagtttctgtttatcccccttttttttttttaagcccattgtttattctttgagaatttgttgtaacttcttcaggataacacctgagtccacaggctgagcagctgtggcccagacagaactgctccggcttggctgttccagcaggtggggcgctggcctcggtgagggcacagcagcaaggttcacggatatccgtgtgtcttgtctgtggccaccaggcacaggtttggcttccggtcagtgtcccgacactgtgcgggaggtgacaacagagcaaagcagcgcaggggtcagggaggtrsagacactgctgaaatcacactaccccaccctcagctgaagccccacgttccacaaacttggggtcatagattgtccagtcactggctccctccctgtcagcacagcacagaggaaggggctaactgaatcttttaccacttctggcctggctccagaactttgttctagattccttaaaagtcggtagctgatgtcaaactcaattgagcagtagctttgatcccttggtctgggggtcgaaggaagatggygctgttatcagcggggaaatgtactatttaagatcagctttgttgtaaaaccatttgttctagaataaaactcaattggaaacgtgggtgaagtggcccttcctgtgaattctcaagctgggattggagggtggctcattgggggtttgggagggggactggggcactaagccttgctgggtgctttggacttcgagaaggcagttttcaagaggatgcagtgggctccagcaagaaactagcagagctacagaatttagataatttatttcttattgccctattacagagcacaagttttgtgttttgttttttgtttgagacagggtcttactcctgttgcctgggctagagtgcagggtgcaatcatggctcactgcagcctcgacttcccaggctcaggagatcctcccacgttggcctcccaagtagctgggatgacaggcatgygccaccccgcccagctaatttttttggtatttttagtagagacggggtttcaccatgttagccaggctggtctcaaactcctggactcaaggaatccactcacctcggtctcccaaagtgctgggattacaaacaggagccatcgcacctggccatatttgttttaacttttttgtttctccctgaagctatgtactcacttaaaaaaagtttttaattgtagtagaatacacatagaaaatttactatgttaactacttttagtgtacagttcaatagtgttatgtctgtatccacattgctgtgcaacagatctcgaactctttcatcttgtgaaactgacactttccatttcccccttttttcttttattccttttttttcttgagacagagtttcactcttgttgcccaggctggagtgcaatggcgtgatcttggcttaccacaacctccacttgccgagttcaagcaattctcctgcctcagcctctcgagtagctgggattacaggcatgcgccaccacggccggctaattttgtatttttagtagagacagggtttctccatgttggtcaggctggtctcgaactcccgacctcaggtgatccccctgcctcagcctcccaaagtgctgggattacaagtgtgagccaccgcgcccagcaatttcccccttttttcaacccctggcaactaccattctactttctacttctatgaatttgactagatagctgatacaggtggaatcatacagtatttgtcactttgtgacgagcttatttcacttagcacagtgtcgtcatccatgttgtggcatgtgtcagaattttattttttaagagactcttgcccaggctggactcaaactcctgggctcaagttatcctcttgtctcggcctcctaagtagctgggactacaggcatgtgcccccatgcctggcaactattttttttatttttttttttagagacggggtctcattatgttgcccgggctggtcttgaattcctggcctcaagtgatcctcctgctttggcctcccagcatgctgggattacaggagtgagccactgcacctggctagaattttctttttaaggctgaatgatcctttgtatgtatataccatgctttgtttatccattcatctgtcagtcaacaatacttaggttacttccccccttggctgttgtgaataatgcagctatgaacatgctgaaagtgctcccaagtgtacaaatacctctccaagaccctcctttcaatttatttgaatatatacccagcaggggaattgctggattatatggtaattttttttttttttttttttttttttttgagacagagtctcactcttgtcatctaggctggagtgcaatggcgcgatcttggctcactgcaacatctgcctcccgggttcaagctattcccctgtctcagccttccaagtagatgggattacaggcgcatgccaccacgcctggctaatttttatatttttagtagagacggggtttcaccatgttggccaggctggtctggaactcctgacctcaggtgatccacccgcctcggccttccgaagtgctgggattacaggcgtgagccaccgcgcctggcctatagttttttttgaggaactgctgtgctgttttctttagtagctgtaccattttacattcccaccaacagtgaacaagggtttcagtttctccacgtccttgccaacatttttttctgtttttccatagcagccatcctaatgggtatgagatgatgtggtttggatttgcatttccctaatcattagtaatattgagcatcttcttacatgctttttggtatacagttcctttttaactaattttcttaacatgtgttttgtaatatgtatcagcatagttttacatgtattaaaccacatgaaattgctaatattctagttttttgcttttcgtttttgtttttgagacagggtttcacttgtcacccaagctggagtacagtggtacagtcttggctcactgcaacctcaacctcccaggctcaagtgatcctccagcctaagcctcccaagtataatagctgggactacaggtgcatgtcaccatacctggctgattttttacatttttagtagagacgaggtcttctatgttgcccaggctggtcttgaacccttgggctcatgggatctgcccaccttggcctcccaaagtgctgggattacaggcgtgagccaccgtgcccggccacactgtttcttatggttcaacctttagtatatacagttgacccttgaacaacatagggattgggtgttgactccccacacagtcaaaaatgtgcatgtaacttgattccccaaaaattcaactaatagcctacttttgattggaagccttactgataacaggtagccaaataacacatattttatatgtcatatgtattatatactgtattcttataatcaagtaagtgagagaaaaaatgataaggaagataaaatatatttactgtatttatcggtattgtaaggtttttactgtatttacatatgagatgaaacatctgtctgaaatggcagcaaccacagctgtggacttcaatctgtggtacatatcaagcaattcagctttttcttgtaatgtcacgacttgttttctgcttcttgggagcacttccagcatcagtagtggcacttcatatgggtcccatggtgggattcaaggtttacagtattgcactaagcatgatgaaaaataccacaaaaactgcaagaaatcactttttccatcttactgggataccagatgtcctggatatgaactgctgaagcggggatgggtagtgtcacacacgttttaagcagatacttgcagcgcttgagctcactacagtaacaacaggaagtggctacattaacagcacactgtgtactatagttaattttatgcagttacggtttcagactgcatcccgacattggtttacatttctcttgactgagaatggtgccacgtgtggtctgtaagtaggtaagttttgttaagttttaccttttaataatagatgtgcatattttatggtagtaagtgataaaatagactagtatttacatgtattttatacattcatgacataagtagcttcttaatttctttgatatttctaggctgtgcaattcatctgagttttttcaaattgttgaaaaatctctcccaaaatttccaatatatttattgaaaaaaaatctgcatgtaagtggacctgtgcagttcaagcccatgttgttcaagggccaaccacaatttaggaatacacatacacattttaggcgtacatgcccagcaggactggagatggctggactgggagagcgtgtcccttgtggggagaggggcctctcgccctccagtgtgagttgtctcagcctgaggccagtgctgtggatccagagagggccacagagtggccgacttgtacctgttatggtcattacaggtggtcagctgtagctggatgtgtgccttgaaaggctgacaagtttgccctgagtgactcacctactgtcacctgatccaacaagatttgtgggcgtagcctgccgatgggtgacgccagttaaaggtagagcgtcggcaccgggaaaccctggctggggtcgggcttctctctgggtactgggccaccggtgcctggcgtccaacatcagagcacacaatacacttgaaaaacagttcagctggacccaggcagggttctaggtgctggggccccagttttgaactaaacagatggcagggggaacagtaaatgaacaagtaaaatacagtttcagagggtgctaattcctatgggaaaaggccagagaaggggataggaagtaaacttttagtttttaaagacaaggtctccctatgctgtccaggctggagtgtattggcactgtcatagcctcaaactcctgggtgcaattgatcctcccagcttagtctctggagaagctagcactacaggtgtgattcaccacaatggattattttttaattttagagatgagatctccctgtgttgctcaggctggtctcgaattcctggcctcaagcaaatccgcctcagcctggagtaactgggattatagacactagccatcgccctggcaggaagtgcggttttaaatagagaggtcagggacagcttcatggaaagacgtcatggaatgggagcaatgtgaccccccaggccacattggaagacctttcaagagtaaggggacagcaaatgcctgggccttgagacaggagcatgaccagaatgttggaggaagacagaaagagccagtgtggttggaagtgtgggaggtgggaatggtaagggcatgggagaggggcttacctttgtagcactgcctgtctcttccacctgaagcagagacctgatcttactggtccctctggccatcagacctagtccttgggagatgcagggggtttcagaacaacctgctgatggtttggcagaagtcaccatgtgcataaaccaaagccctggatgtgggtttaaacctaaaagaaaggccttaaattggatagtgatgcaagatgaggttgggaaggctggtggattgatggaagagggtctggaaactgcctggagttgaggtttgattttttttttttttttttttggacatcaggaaatcacaaaatttcttgagcagagaagtgcctcggtgatgaacagtacaagagattagattttgggaaatgtaacatggtaggactcaaaggacccttttgagcagggcatgaagatggaggtgggagacccgggagcgactcctgcggccacacaggccaggcaggtgaggactagggtagggcttccacaggaaaggggaaacggtaagaattagaggcagctcaggtgagacagagcaggcacagaaccatggggaaaatattggaggagtgggatgtgttctgactaagacccgaggaggtgagcagaggtggaggtatgaggggttgcagcaaacatgttcctgtctgaggagcaccacggggcactggggggtcctatggggattgtagaatcaaacctatgattggatctttagggggttactttttaagtgcatgtttccataaagtaacaggaatgttacttcatttcctcctaaatcagggtaacctttatgcatttgaaaagcataaagtccccacacagtctgaattaaagcaaaagttgcttattcaggatgggaatcaaaaactctcacacctcaaatttgcatccagtgaacagtaagcaggagcagggctttctcatgaagacgtatttcagtctttggttttatttttgaggtttgttaaagttgggcatccaaatcccacttggtgaaaatactacagacctggggaagttacttttcaaaccacagatcttcatgacactgggaggcagtcagattggagggatcagtgtggattctgcacagatctggggtaggaggcaaccgtggggaacgctcagcttattgttggatctcaccacagtgaaagacaagcacttccctcattgaaagttgattttctttttgccccagttgtaactcatk

SEQ ID NO: 95304 - DNA, 18041 bp, Homo sapiens
caacctggtaggcggaagttgtagtgagccgagatcgtgccactgcactccaccctggtgacagagtgagactgtctcaaagaaaaaaaaaagaattgtgtgtatatgtgtgtgtgtgtgtgtaacaataaaaacaggtagcaatcaatgagttattgttctaggactgtttctacccactttacaaatataaatcattgattgcaatagctctgtgatagagtattcccattttacagataaggaaactgagacatggggagatgaaatggtttccctgagtcatagggccagaaagtaggtaagccaggattagaatccaggttgggctgattccacaagtcctagtcttgactagcaagataaagtgtaacaaattatgtagaagctatcatggtataccaggttgaattcattcagggccactcatcaggttggcagcagtgtgtatgtactaaggagctttgaagggactgagatgcaagtttggattccagcataaattacctgacattagagctcaggcttccccaccttaaagttgtgataatggtatacctgttttgcaaggttatcacaatggttagatttaacccgtacaatggttggtgtagaataagttgtagccactatgttgttatttcatgatatgtccagatataacttttataatgaacccaccaacagccttaagcagtgttgtttagactggagtttggggctcccwagggttctattaatatattcttgggggatctgcaagttcttaaagtttgaaaaactgagctaaagcattcctgtattgtggacacacacagttacttccactgatttctgaagcaaaaatagggtggcaggaaatagtacccacttaggaaaataatgagttctcttacacaacagctatatgtactactcacacctgcgtaaataaagcaacacaagatggagagaaaagtcaccagaggaaacagcccacacagggaggctcacggcaaatattccacatgaagatgcaacatggataatgcccgacaccacacatgtggtgcttcatgacacgacatgagaaggttttggagagctgaatacatatagtctctcacttacctggctggcaatgtaagctatactttcccactaaggatcatcgctggggctttcaaaatagtacaacgggaaacaaggtaccgtcaactcctttccaaaagaaggtaaatgcgcttactcagaaatgtactgcagaaatgccaacgtcatgagtttcttatatatacatttatatatgctttttacatttcctgctttgtaaaaataaaggataaggaagaagaatcaatgaatattttcccagtggaaggcatggaattaaaacatctgaaataaaaaattaacattgctatcttttaatgaatttctttgctagagaccgtctagcttttaaaaaaattctagataaagtctctacaggagcctgaatgtaaattaatttgtctttcatcagatgacgggaaacagaaatgcaagaaagctgacgaagaccgtaatttttaaaagcttagccaaattggctaaggtctgaatttcacaatagttcatgtttttcttcaggtggtatcatcctggcaatgcgtgaatgtgccatctcgttcatggggaagctccaatctccccctagatatgcttgtgggtgtgattctggtgttgctgtccagctacctctgccttgaggtctaacctagcctgcctttccccttcccccgcattgtttggagaaatcattaacccgtgctcaataagcccttgcagctcctcatcatggggcaagctgcacggagcttccacgtgagaagcagtttgattgcaaacctggatctgcaattcccaggggctgccctcatggaattttaattgggggctatttgaaattccctttggctttctcacagcctatcactgcctataagtcatgttacctactgtcagttccttaggcttcttgtgtttctcggttgctactgttgtggtacaacttcttggtatcttttaaaagcactcatcagaagaccttagggacagttttgtgcaacccatatacattttacattaagccatactatttcaggtgtatccttcaaatacagttaaattcagttttgaagttttagctgcactgaaagccactgtcactttgagggcctacctgggacccctaaatgcatttacattttaagtcagaacttccaaaactctccttatttgctgaaaatctgtttaactgttttcacatgatgtgttaataaatgtcattgtattcacagagattattccaagaagattaaaggtcatgctagcccatttgcatcttataaatctcaagtgccctcaaactcaggaaaattcctgcaaaagtggaatgtttctcaaatggcctagagaaaattttataaccaaaatacactgctttaaaaattttttttttttaactaacaatttttaaggaactttccagggggaaacaccaggaggaattcaagcacaagcacaggtgctcggtgcacacatacatacacacacacacacacacacacacacagaggaagaaacaagaatctatgaaagtgcttctctgcactcatgagaatggatcacagatgatctgctatctccaatttttaaatacagacctcttcatatgaatgatatcctctgaagggcactgaggcctctggaattaaggaagcctgtaattcttccaactactacagcccttatctcctaagagagcttttcctcagtgcctcacaggaatggcaatatcaccaccaacagcattccttatgcaggaatgaagtggtgatattttaaaaatcatcttctgaataccgactttgtgccctacacttctcgtgtgtcatctcagttgtgtctaatcctcacagtcctttgagggaggaatatatattcccaatgttacacacttccgaattccttttcttgctttttctctatagcgctttcactttctaatatataattatttgttttgttaattggactgtcctcattagaatgtaaacttcagtgaggcaggttattgttgtctgtttattctctactgctttcctggaatctagaataaatgcatcaatgaatgaatgaagtgaggcccagactactactgagtgacagaggtttgaacctaggcttatgtgctgtgctgacgcactagataaccaatgacacttgtgaagattaggatctagggcatattctaagagagataaaatatgcaacatttagtgaatgtttgactgatgaagggttgcgtgcaaagaaaaccactggtgtgtaaaaggagcagggaaagcagcctcgcttttgatctttgacatggaggatgcaacagaaaacgtgaggctggagaaagcctggaggtcaaaattcaaaatgctgaccttgaaattcttcacatgtgggcagggaataccacgtggaggtgaatatagtgtccataacactctatgtaatccgtgcatgtgggcatccttaagagtctgtaaagggtttggcctcacgtcttgacactctgttgctactgtgtgcccttgggcaaattctttaatctttgtaaatgggataatttacatgttttttctgaagactgtccgaaattatgcaagtaaacacagaaacaagacggtacccatcatgcagttaagtgcccaatatgcattgttgtatcagtttgctgtggctggagaacagcgtgttccaaaggtgaccagtagggagaaatcagaaatgtagctgggtccattctgataactgtgctaaaggatttttgatcctggtctacgataacaccccctttacttgacagctgaattggaacggattaaatcggttagggtagtatctcagagggctttgctgcagatgagcgagtccaggcgggctgtcaagcgagcctcaaggggcatctgtgggatgcccaaaccgtgtccccaagccgaggcctttttacaggtcctcaattcagaatgaaaaattaattccaacggctaatagcaccccaccaccactttaggacgtttcaccgtacccattttgtcgtcacagggaccctatgaagcagatagttttatcttcgttatgccgacgtggaagactgcaacttagaacggctaaatgatttaactaagggcgcttacctaggaagaagcgggggacataatgcaaacgagggccgtcycactccagaagcccttttcgcagcatttctagtactgagcagtcagaacgccactttaatcaatgcgccaggaaacactggcattcccttggcgataaagttcagaagcatgggtaaaactacagtttcgatgtatcctcccgaatctatagtcatactcaagtagctgcgtattaaaacaggcaaagtagaaacccaacttccctccctttctcttctgttggaggtcctgtgctgaacctccaacaggtttgctcttctcagttccgctgaagggcatcctgcctcttccctccctgtccccaggtcccaatgactgaaacgtctcggggtgggaacttctgtgacagatcgtggaggacagggggagtcaactccagcgcaggcctcccccggctgaaactagaagatacccartgaaatatacgagttttgttccaaggactgcccaaaaatggtgcggagaggagctcggcaatccccacctttgtcgaacacgctcctccaggggcggcctgcctgaagcagagctccaaaattggcaacctaggcstcgcagccgcctttttttagcctacatttcccaaaccagggaagaggcgggtgactaaaaatgcaaattgcagcgggggtgttagcaggcatgcccgtgggtgcggggcgtcgggcgaagggagaccccgcgaccttaggcgccctcgcggtgttcacggtaggcgcaaagcgcagcaagggacactccccaaagccgcaccccgccggacggctgcccccgcttccgcctctcaggcagcggtgggacaaagcgcggcctcttttccgccggggtttagggagggaaggccggattagggcccgcgccttccggctgcatccctctcgcgccgcgccggccgcacacaggtggttttccgctcrggaggggcaggcttcggcacttttatataacaatagagctctgcgcgccgggaacgcgcctccccgccgccgcggcccccacccggccacgcctccatccggcttccaatccgtccgccccgcggcgcctgggccgagtgctgctcgctggcctggcccgcacctccccaaagttacctgctggctttgcagcgcggtagagacgttcccctcgactccttgggagcgaggagccaggggggtcccggcaggcactcgtccttgctccccccaccctccccagatctctatggacccgggagtccctcgctgagccccgcacccgtccactgcgtcgcgcacagccccgtgcccaagcggggagacggggacggcggggcggtggcagggagcgcagcgcgcaggcgcggctggtgctccccggagtgcccggcgctggacaaagggaggaggcggcggcaggagagggctggggaggccccctctgacatgcctccctgccaactgtaaccaatcgtcgagcccccctgccgagcccccgcagcctgcaggtcttgcgggaggacttcctcacgcctcgcccatggcggggactgctggcccggcccggcgcgtcccagcacacctcgctcaggcagccccgccagaccggctcccccgtcagaagccgagctccttgcccagaaatcattaaccagcgcgacctcccagcaggcgatggtggtggtggggcggggggagagatatagattcccccgaacaatggcttgtaactccccacgccgccggagcggaatacagtaaaagcactggactgacctaagagtttgtttctgcactctacattgttttaatgaaaataaaatgttattttaagaaaaaaggttttcttctgattttctgcacaaccagacgtttgtttgtttgctttaaaatgtttcaacaaaatcctggtttgtttcgaaataygttggattagcatttaacacctcatcggtcactaaagcccagtcagttcaccagccccaacacagcctcggctaaaagaacatcagagcaaacagagctgggcctttaaaagtggcaaacaaatgccacacaccgcctaaagaaggggggttgggggaggggagggttaaggcgaacttgggtccaaatgagtttgaagggaatacaaagaacgaaaagtcagcacaagttttcctaaagctagctcgcgaacgcaagcgtcgcgaacaagggcttttgtgcatgctaattgcgccattggtgcgcaaaagttccgacgcgaagkgtgaactctcaacagaaggaaacatgagacaactgaagtgccctggtttatgtgccctgctcctcctccgctgccgcctccccttctttctccttcctcccgccgagcccgctgttgcagcttgtttgcactggggcttatccggagcggaaattcctttccgtttttgtgaatgacaaactcattaacaattcatcaacacaacctgttccagccggcccgtccccacggcaacagccccttccgcagcacgctcattggctggcccggagaatgtatccattgagacgctcgctgtttgtatccattgaggagctgcctcgcgcagggggtgtgcgaggctgagtccaagagatagcaaatcgagtcttaaataatccggggagaaagacgcccgggtagatttgaggtgcagccttggagggagggattagaagccgctagacttyttttcctcccctctcagtagcacggagtccgaattaattggatttcattcactggggaggaacaaaaactatctgggcagcttcattgagagagattcattgacactaagagccagcggctgcagctgggtgcagagagaacctccggctttacttctgtctcgtctgccccaaccgctagcctcggcttgggtaaggcgaggcggaattaaaccccgctccgagagcrgcagcttcgcgcgcggtgcgctcggcctatgcctgccccgaggggcgtctggtaggcaccccgccctctcccgcagctcgacccccatgatagatacgctcagacccgtgcccttcgcgtcggaaatggcgatcagcaagacggtggcgtggctcaacgagcagctggagctgggcaacgagcggctgctgctgatggactgccggccgcaggagctatacgagtcgtcgcacatcgagtcggccatcaacgtggccatcccgggcatcatgctgcggcgcctgcagaagggtaacctgccggtgcgcgcgctcttcacgcgcggcgaggaccgggaccgcttcayccggcgctgtggcaccgacacagtggtgctctacgacgagagcagcagcgactggaacgagaatacgggcggcgagtcgktgctcgggctgctgctcaagaagctcaaggacgagggctgccgggcgttctacctggaaggtacgcgcccagggaactccgcgcgcggggcagggctaggggcgcagggctgcgggcggggcgcgtggattgaaaatacctctgctccgctcagctggagcttcggagccgcgctgcccgcctagggaccggcagccggcgaggtaggggccgcgaaccgcgcgttccgcaccagagaaccgggccggctcagaatccactcgcttccggctgcgggtaccggcggtttcyttctaacgggttctgcgccttcttagccagaacatcctccaccatcaccctgttttctatcgttcgattttgaattaagatttgcaggacgggagagattgttggggatgcaaattggcacatcttagctctcaaaatattccaaaaagttgccattttgtctatttccggattcaagcgaataagggttccctggcgaggcgggcccgttcgttccattcccgatggtgcacatttaaagtgtgtttctcttatagatggttctgtatgwagggggttcgtaggatgcttgtggtgtttcttgcgccgggctgcggttcttacaagctgtgaaaactactacggcttctcaggttagaygattgcttttctcgttctggcaggtggcttcagtaagttccaagccgagttckccctgcattgcgagaccaatctagacggctcgtgtagcagcagctcgccgccgttgccagtgctggggctcgggggcctgcggatcagctctgactcttcctcggacatcgagtctgaccttgaccgagaccccaatagtgcaacagactcggatggtagtccgctgtccaacagccagccttccttcccagtggagatcttgcccttcctctacttgggctgtgccaaagactccaccaacttggacgtgttggaggaattcggcatcaagtacatcttgaacgtcacccccaatttgccgaatctctttgagaacgcaggagagtttaaatacaagcaaatccccatctcggatcactggagccaaaacctgtcccagtttttccctgaggccatttctttcataggtgagactaattaatagtcgtcgctctgacatttaaatgcaaaattcctagccattcatagagtttaagctgttaatcgttcttgctgcttgctaatttgtctgactgcaggtctctamtgttcctagagcgtccttaattctggtttatcttcttgctaaaggaagaaaacctgccttttgacatggctgcagatcacaggtgtatttgaaacgctgtttcttgaatctttgaattcagtcattgacagtcgttcataatcggacaacagatttttccccccagtctttggactcaggggaagggtcagatagaagtactcactatagacaggaattccagcattgctttataatttaaaaacatctaggagttattttaggacatcaagttagttgttggaaagcagtatgaatgctgaatgttatscagttgaatgatgckgtgatactggtaacagtgagacagtgggtaacctgagcccagcaggaagaactgtgggctggaagcctgggagaagtgaatctccaggcattgtaatgcatttcctattacaaaggaactcattttcaggccgtgtcgacatcctgttcctcctaatgggccgtcccctgtgacttccctctctcttttaaaatgcctgaatacctccattgttagctgcacaacatttggagcataatttaatagacccttgcagtctggttgtctgtgtaaaaggcattcacgaacatattgcagggtttctggyattcacatgccgaggcaaagaatgyacccattaaggagttttttgttggcagaaacttaatacaaaagctctcttttcagaaaatatctgaaatatgtaattgtgtccagtgtacatgtttcatttcagtgatacattttctgctgcttgtagggctcaactgccacacacaactattattattattatgttttcaagttcagtttttagactgatcattcacaaagggtggttttcagtctgctgagatcttgcttttctttttgtgttcacagatgaagcccggggcaagaactgtggtgtcttggtacattgcttggctggcattagccgckcagtcactgtgactgtggcttaccttatgcagaagctcaatctgtcgatgaacgaygcctatgacattgtcaaaatgaaaaaatccaacatatcccctaacttcaacttcatgggtcagctgctggacttcgagaggacgctgggactcagcagcccatgtgacaacagggttccagcacagcagctgtattttaccaccccttccaaccagaatgtataccaggtggactctctgcaatctacgtgaaagaccccacacccctccttgctggaatgtgtctggcccttcagcagtttctcttggcagcatcagctgggctgctttctttgtgtgtggccccaggtgtcaaaatgacaccagctgtctgtactagacaaggttaccaagtgcggaattggttaatactaacagagagatttgctccattctctttggaataacaggacatgctgtatagatacaggcagtaggtttgctctgtacccatgtgtacagcctacccatgcagggactgggattcgaggacttccaggcgcatagggtagraccaaatgatagggtaggagcatgtgttctttagggccttgtaaggctgtttccttttgcatctggaactgactatataattgtcttcaatgaagactaattcaattttgcatatagaggagccaaagagagatttcagctctgtatttgtggtatcagtttggaaaaraaaatctgatactccatttgattattgtaaatatttgatcttgaatcacttgacagtgtttgtttgaattgtgtttgttttttcctttgatgggcttaaaagaaattatccaaagggagaaagagcagtatgccacttcttaaaacagaacaaaacaaaaaaagaaaattgtgctctkttstaatccaaagggkakatttgcagcatgcttgactttaccaattctgatgacatctttacggacactattatcactaagaccttgttatggcgaastctttagtctttttcatgtattttcctcatgattttttctctttatgtagtttgastatgccttacctttgtaaatatttttgcttgtgttgtcgcaaaggggataatctgggaaagacaccaaatcatgggctcactttaaaaaaaraaagaataaaaaaaccttcagctgtgctaaacagtatattacctctgtataaaattcttcagggagtgtcacctcaaatgcaatactttgggttggtttctttcctttaaaaaaatttgtataaaactggaagtgtgtgtgtgtgagcatgggtacccatttgataagagaaatgcatttgattgtgaagaagggagagttaaattctccattatgttcgtggtgtaaagtttwgagctggaatttattataagaatgtaaaaccttaaattattaataaataactattttggctattgaatgtgtgtttttaaaaactcagttatacctatgtgtgaagtgacacattttagaactttttcattcagggattgattttgacttgtaggcatagtagggcaaggttcttttaagcttttcctagaaygtttttcagcagcagtttatgaaattcatcgtttgccacgaataaagatgacatcctagaatggaccgactgtaccgtgtatatgaacaatacctcttatgagtatagttccggcttaagattttaaagcccctgaagaaaaatgaacctatagagcatagcttgctgaggaatacaatttggatattaaccacagagaggtgtagcagaataccaagatgacagccacatgttaacctcctccctatccttcactgtcaggatcttctgctytataatgctgagataatgccaaagaggaagtagggataattctttttccagtctgttgtcatgggcaattctacctgcagatatcctagtgtgagaatgctgaatccagaatgatgtctccactttttcccctagcatgcgcatggcaaggcatatctaagcttcctcacygtgtcaggatayggctttagaattttacattggcacttaggaggcaactttgtcatccctgttgtaatgtgcttttttgtttaactggcttgggatgtgggtcagaaacccttattgaaacttgtggggattattttagtttcttttcaagctaaagactttatatcttgccatttttcttgggacctaccctctccttacctcaaatgtaaaaatacacaaaccaaaataaaaggcaggtgtatggaatcaaaagaactagaacgtacttatatttggggctctttttgcatgagctcagtcccttcatgtgaagtggggagaagaatgagcttttcacctacatggcacatgagttgactgcttggtcgtctacactaacttaggaggcaagtggccttcattcgatggcaatcatataaaactgtccatggtgatttttaagcaactaagtataaaaagcaaacagaaatagtgcaaatatatatatataccaagtcagtctgtcctatttgggtgtcccaagtcagcaagagcacagaaaggagaagtggattgcagttcaacttggctcgtgttaatccagttctgaacggtttccgctcctggcattccctaaactgcctgttcaaagtaaggatttgcaagcagcgttagcaatttcctgtccagctgcagctcaagtagctgggtgcttttcccccctttcttttctctgatttcttttctctttctttttctttctttcgttttttaaaaaaatatgggctgtggataattttagtgcatttcctctttgtggattattatctctttcctcctagaacctgcatacattgagttcctactgcttggctcaagccgacagctggcctccccagcacttcctctcgttttactgtgggtttgttgtttgtcagtccacttctgaaattaataatgttttctggctaagtgccacaagccattaccacaaaggggaagtaacacatatgaatagcaggaagccatgcagggtcacagtgtgagctgaacctgtggagggagcataattgagcctggcccattcagcaagtgtctgactgcaatttggggagagggagctcgctgcatctaagcagctcaagctgtgaaaaaaaaaaaagtttccaataaattgggagcaaatggtctttgtcaccagtctgaataaaggagagagagagtatgaagagcttagagcctccataaagttgcaatgtttgaggtttctcccccttctcctgacatattgtttcagaaggctggtgaacagaggggtgcctgtttccctctattctcaccaaaggactcatgttaaatgggtggtttttacggttcacataggccagaagattcaaagagctattctctttccttctttttcttctgtggaaggtggaaggttgtaactgacagcatgggcccccacctctctctgtgcctccctttcttccagctatatcagggctcctctggttcctttgtgcttgcagtagccgcgtgaaggcgatcattttgcatcttggagttgggctggcttcctgaatggagcccgcacggttactagggcaacctttgccagcagctgcagttccaccgcctccttcctcacctgctgtccccattagtagcttcctcaggtctctgagaaagcgctacctttcctggccttttgcaggggcaggggggtagggtggggtatggcttttgggaaggggaggttatcagcaggtttcctgggagctgcaggagacagagattgcagtggttaatagtatgaactggtcttagcgttaaaataggaatgaaaaagggttatctggggataaaaataccaacacagtcttcaaaggaatgaaaactgagacttgcaccaaccttgacaattaggagacctgaactgtagctgctgctttcttgctaatgaatcaggtagccctgggcagggcacccaatcttaccgcatttcttttttcttgtctgtaaaaatgagggagtttttacctcccattctaggattctctcataattccagcttctgttcatggattggtgacacttattacatgataaaatgaggtgcggagcaggtgaaacaaataactaacatttatcatgagtaccagatactatactttgtatctcatttaatcttcaaaacagctctgtgagataggtcctattattatctttattttgcaaagaggaaactgaggcagagaaaggccaataaagcctaaagccacctttatgggacacctgacacataatgttagagaaggtttgcatatccagtgcttgttactgcagaactgaaccttgagcctttggctcttcctgttggaaactgcttgtcatcagtatttgctcccctttataaagtctcatgatgtcggctaggaaatgctgtccccattatacagctgaggaagtggaggaagcagaggttaaatgactagccaaattccatgtgaattccacagccacatgggaggccccagctggtgtgctgtcagagaggtgtccaccgggggtaaacttccatcctccttctccgcagagaagttgctcttccttggtcccattggcacttaaattataaaactacttttcctaagtatctctaaaatggctaccagctagcatagggcctgaccctgacccttgcccatactcccctttcaggatgacacaactaaactggccccaaagaagttcacttcctcactcttatccctcctagaggcaaactgggagagggaggtgggtcaggggaaaggggaagggtgtgaagaagcaaggaggagaggcagaagacatatatatggtgcaggtctacagaagaagagaggtaaactgaccagcaaattagcaaataatggagatgggggtttttaggatacagccagggcagatcatgtggtagctggctgtaagaaaatatccttgaaatgtcctcttaaaaaaagtcagtcttcagactttcagctgcttcagaaggattactttgggtgtaaatttatatgcagttcctcacacagccataatcgttttcggaaagatcctgcaagactttcaaatacccttgttcctcccgtgttctcactgctcacttagcaattggccctgaatcagtccagttatggtgaacgaattttcaaacttctttaaagtccaaaatcgatttcctgagaatattgaagggcacagaacaaagttcaaacaactcacaaatatttatccaggccttggtgtgcattgcactggttcgatgaaacaagttaaaaataaaaggcaacgaaagacctcccaggagccctcagaggctgaaggcaatgacccgtttctagatggaaccgctaaagtgcccaaatcaaagaggagccctgaagaaactaccgggcaaggtcttgtatttccctatctgcttccaactaacattttagatcccacattttatttttttatataggaaaggattaatggcccacatgtatgcaatttgacccactcactttcttactttgtcatggaaaacaccactagagaaggcgtgcatatctattagccatcactgatgtaataaaaacatgttaaaccaccataccgtcaaacatgaactctcagacactcaaaggaaaagtgaggaaatatcattcactttttgataatgacatccgagaaagcacgaagcaagtctggaaaaggttgctaattctaaagaattctgtttcctacttttggggaaaatctaagtatttatcacgttaagtatttttcattgggtccagtttaattcctactgcaaacacgaacagaaggaggaaagaaagagcggaaggagcagcaggggatcttcgggtgtacctggctctctgaaaaattgtagcaggaatacccttttatcttatgttccatttatttattgctacattacaaagcgccccaaaacttagtggcttcaaataacagtcatttattttgttcctaagtctgcatttggtcagggctcagcaggggaggctggcctctgatcagcgcagttttgtcaggggcagctcaactgctggccagaggattcatttctaagatagttcactcactttgctggtgagttggttttggctttggctgcccactgggacctctgccaggggccggggctggggactttggttctccatgtggcctaaatttccacatagtatggtggctgggttccatgggtgaaatccccagagagagagagagagagaggctggtggaaactatgttgatttttatgacctgctcagaggtcacttctgctgcatacaaagtttaaggagaaagaacgtaaaaatccatcttttaatggaggagaggaaaaattctgaaaaagcacaagagatggaaaatattgttgcagttgttcttggaaagtacaatgtgccacatcttggttgcgtgaatgttgtttcaatgtgggactgtgagagtaatagtgagtacccacggagatagatatgaaagtgtttagccatactaatttcttggttcaatcttgaaaacattcaacaactgctataattgttcctttattcctatttttttcatctgtttctaacgttaacagtagagtaatgccgtcaaaacactctttaaaggccgggtgcggtggcttacgcctgtatttccagcattttgggaggctgaggcgggtggatcacgaggtcaagagatcgagaccatcctggcccacatggtgaaaccctgtctctactaaaaatacaaaaattagctgggcgtggtggcgcacgcctgtagtcccagctactccggaggctaaggcaggagaatcgcttgaacccgggaggcagaggttgcagtgagccgagatcatgccactgcactccagcctggtgacagagcgagactccagctcaaacaaagaaacaaaaaaatttttagattgacccataaaataaaacagtttttataaaagaatattaatttttttattttgtcagagaaaacattatatttgagattgagtcgcccaagttattgagtgtagctatggtatacattattttcatgcaaaatatagtgtttcatgtattacattatagtaggtaatcttacattggtagaatttgggtttttccccctaattttgactattttgaacaatactgctaagaatacttttgtgcatgtattctaatgctcatgtgtacacgtttcccggtggtttgcagaggagtggaataagcatagtttgtgtagaacctcaatttcagacaattaaaatcgtttttgaagtggatattccaacttatattcccactaatgatatttaacttttcatactctcccaaattttttataaacacttgttttgtttacactttttagttttcacctatctagtagatgtgaaatggtagtttattttgattctaatttccattattctgattcctaatgaggttggatccttttcttgtgttcattggccataagatattttattttgtgaagagcctgttcaaatctgttgtcaagtttcagttgtgttacttctatttttttgtattgatatcagaggtgcttggacactctaaatactagtcctctattgagtatatgcattaaaaatatcagtacaatgcttttcaaactttgttcctcagggaaggaccaggctacatttggaggcaggatgtacactgcacagctctacagggtatcagtcagaaagataatgatacaaatggccatgcccaacctgtataaccctacatggagttctaggagactcatgtgggacttgtgcctaaacatatttgaaatccactcattgaatccatttaacaaatgtggaaacagagtcagagagattaagttgaaagaatagatacttttgattatctcgattgaagtggggctggcctagaagtgtttttggttatactaaatcttgaactcagttttgaagaggggctagtttttcacatagatgtggaaaagatgtgacagttgtgagtaatgaattacacccagctttggaagtagtaaaagacaaacttcctcgcaagagatggcaacaatatttttcaagatgtaaaacagagataaaaaatcaagatgcttagggatatgagagataaaatttaaagagaagttgcaaagtgcagaaataactgtattttttttgtctgcctatcctcccttcccagttacttgtagttgtggaa

SEQ ID NO: 95305 - DNA, 37897 bp, Homo sapiens
  misc_feature (1)...(37897): n = A,T,C or G
attatccttggcttaaaacaataggtatcaactacttgctcatcacattccatgaggataatgcaactttcctccagatggtgatgtagggatcacagctgctttcatcttgtgcgtccaccttctagaacacatggcacatatcagaggaagaaaacttcaggatcataggtatgttcttaagggtgagccctaggggtggcttagatcacatctatgcacatctcactggccagaacccagtcatgcagcccaaacaaactctgtggagtcaccttacttacagcataattttgtatccttagccaattccactgggaatgtagtctaacttgacagtgggaggtgtctgtgatctcacctcaagaattcagcactttttaaaattttcttattttggtaagtgttaaaatatattttcaggaattcaaaatgtagggcttggcagggcatggtggctcactcctgtaatctcagcactttgggaggccgaggcaggaggatggttggaggccaggagttcaaggtcagcccaggcagcatagcaaaacatcatctctagtgaaaataaaaattaaacgtaggtattgaagatgtctcttgggcttaaaatatgaaataattcctcttgtctaattttttcaaatgtgcagccctattatgttttggataatttagaagttcttaacaaggcaaaacagctccccattaagactgtaataaacacaccaaaggtttccaagggctagagtatggaatccagcttgtttcattcagccatctcctacttaaaaacaaaaagtctttgaactgcattgccatctataaataggaaagggaaatcaacttctgtaggtttgtaatccctgcctccaactctacgtctactgaaaagggccctctggctgaacatttctcagttatggtacaacacagagatgcctggctgcggtccctacagttctacaactttaccctggacagagtctcatttcaactctggtaagcttctcatatacccaccaagtgagccaaatggaaattttcagtgtgctcagagaaaggaaccgagatatgtactctctgcaattttctattacatttactgccaagagtggccaagaagtcatttccaaacccacttcttaaaggaaccccaagaaagcctgagtgactggtagccactgtgtatactgagaggagagttcaggactaggagggccaggattctaggaattgtcccctcctgtggctgacatggaaactgcaggagcttctctgtagcacagctaggagctggggaagaggccggagggaaaacaaagtcagattctagcacctagcactaaaggaccctgagttcatacaggttgaacccaaaatgaagaataggggagaaatttatcaaattgtcttagaatgctgaggggaactggcaaatccctacctgtgtaggagatggttctccacatgaccccatccctgtaagagatatattggtttttctagatgcatctgttctattattccactttcaggaagggccttggtttggttcaaaacagaaatattcacttcatagtgggtggggtgggagtagcgggttgttaaagaacctggtatattttccttttactattaagaatttgggtttctttgagaacagaagttctcaatcattttttcctgagaacccatttacactcttaaaaattatcaaggaacccaaagagcttttgttaatctggatgatatccatctatacttataacatgagaaattaaaaacctttagtaatccattttagaaaatgaatattcccattatatgttactttaaatagcatactttaaggaaaaacagctatgtttttcaaaacaaaaatatggcattgtttacccttttgcaaatctctttaatgtctggcttaatagaagacagctggaatcatatacttctcttcgcactcaatctgttgcaatatattggtcaaagaatatgaagaaactccttcctcacacagataagtagaaaaaggaagaaatatttaaatcttttcagataatttgggggtattttgagtttccacacctaaacccaacaagtggtagccgtctaaaggttagtacaatgtggaatccaaaaccctatcaataaatattttatatttggtgacattaaaactcatcactttggcatgttttccaacaccaacaaccatttatctgattctccacacaccagttggctgtcctacaattcaacttaatcctgacactaactacctggagttacagtcagactccacaggttcagggctcagtctcacaagacttccctcacttcagatgccagttgcaagaattgggtccccagattatcccacttctttccagcttggctataaatcaggggttccatgactccctccctcctgtttggtgatctgatagaatagctcacagaatttgggaagacagtttatgtcctactatgtccagtttatgtcctgttataaaggatacaactcaggaacagtcagatggcagagatgcatggggcaaggtaagtggaaagggtgcagagcttccctgctctcactgggcacaccactctcccagsacctgaatgtgttcaccaacctggaaactctctgaactctgtggtctagaggtttccatggaggctttatcatgcagacatgatccattattaacttaatctccagcccctctcatctctccagaggactgggtatagggcaaaaaattggaggcttccatacgaggcctggtttttccagtgaccagtctccatctgaaaatatttaggggcccagcaagagttgcttcattagaacaaaagatactcctatcacccaggaaactccaagggatttaagtgctttatgtcagtgtattagtccattctcacactgctatgaaaaaatgcccaagactgggtaattcataaagaaaagaggtttaattgactcacagttctacatggctggggaggcctcaggaaacttacaatcattgtggaaggcacctcttcacagggcggcagtagagagaatgagtgctgagtgaagggggaagccctttataaaactatcagatcttatgagaactcactcactatcaggagaacagcagcatgggggtaactgcccccaggatccaattacctcccacagggtccctcccatgacacgtggggatgacagaaactacaactgagatttaggtggggacacagccaaactgtatcagtcaggaaccagggtcaaaggccaaatacatatttcttattacactacaactggttgatcactatacaatatttttttacaactagttgttagtactacttctgatctcatcagaaaaatctttaaatattgggaagctgtcaaacttacagtgatggatacaggttttgcaaaagtctgatttttcacttgaaagcttgaatgttatcacagacaacaaacactatcatttgtttttcttgaagtgacaggcccatgtcattcattttggaggaaatgtctgccaaatgcccaaatctgggtaactgcagtttgtctgtcagttctgctttcaagtaaaactggcgttccataaaaaagagctgcagcttgtgcattgcaggccattgcacaatggcacggccttcagcaaccatcatccttgggatgcagcaggattgtttctgtgcatttcccaccctgtcatgagggacatgactgcttcacgggggacattcttcagtgacactttgtgtttgtttttactgcaagtgcatggtggtgaaggatgcagttactactgatttggtgttgtcccactgctgggatttgtgcttacttttgcacaatcagagcaaatgtctacattgtaaagaggacaaataatgtcccagttcaactatgaaaacagttttgtcattgcagatcctctgaaaggatcttggagactcctaaagatccactttttggagatcactctttgcgaactgctattttagaaacaatcctcctgctacaaagactaaatatttggctcacacgtgtaatcccagcactttgggaggctgaggcgggtggataacttgaggtcaggagtttgagaccagcctggctaacatggtgaaaccccgtctctactaaaaatacaaaaattagccgggtgtggtggcacgcacctgtaattccagctacttgagagactgagacaggagaatcacttgaacccaggaggcagaggttgcagtgagctgggatggcaccactgcactccaacctgggcgacagagcgagattccgtctcaaaaaaaaaaaaaaagactaaatactaatattttcctagacattcatttataggaaaaaaagaggaactattttgaaaaactccaacaaaaaaaaccaaaaaacctcagttaccttagttgtcaatgtgtaagcctctagaacaaactccatcttttaaagttttgaacagtatcttgggaatgcagtaataacagtgacaatagtgtgtgtttgttgcagtgtttactactgcgggatgactgtgctttgtattttaaatgcatcctctacaatattctttagtaccacacttttttttttttttttgaaggagtttcactcttgttgcccaggctggagtgcagtggcgagatctcgactcaccgcaacctccgcctcctgggttcaagcaattctcctgcctcagtctcccgagcagctgggattacaggcacgtgcccccactcctggctaattttttttgtagttttattagagacagggtttctccatgttggtcatgctggtctcgaactcccgacctcaggtgatccacctacctccgcctctcaaaatgttgggattacaggcgtgagccaccacgcccggcctagtaccacattctgtagatgagaagactgggacacagagagatgagagtgtgacaaggtcaacagtcatatgcagtgactaaggctctgaatccacgtggtctgattcccagagccttgatccttaaatcctgcataatatgctgcatcacatccaagcttcacatttacttacttcttttctgccgtgcacgtgtatcgattcaaatcctcaaagggaaacccaatgtctcatctcaaccacagggccccaaaaaagggctcagtaaacgtcttctgcatgagggacagaacctttaaaccatgattagtaatggggctagaagtgaaatactcaaacagccagctccctcaatattattaactcattaaggagggaaccaataaaaaagaaaaaaaacaaaaacaaaaacgcttgttccttgaaagctttgaaaaattgtgtgtgtgtgtgtgtgtgtgtgtgtatacatacacgtatctattttacttgtttgctaaatagacacagatatagtcgggtagttaacaaacatgtaggttgtataaaaataaaactagtttatcttctttggggcaataaaatcccaatacctttgaggttgactcaggccttatccatttctgcaggttaagaagttacaattcttcaggtctgtaaactggtcaggccgttatcattgtccttcgttaatccactgtacctagacaacagttacatccccaacccggacagccaagggggttctttaaagaatagaacgtcccccttttactaagtaggcttattagaaaatgctagaagttacccttaacgcaagcaagtggcctttttccaagttggggatttaagaaatttacttatctattttttgtatttttccaaggtggttttgtgtgtgtgtgtgactttgttgttgttttggtttggttttttgcctttttccaagtttgggattttttttctttctcaaaaagcgaacctgttttctggatggaggcccagcggacttgttccggccgcaggtctcggtcagaaagaacgcttttgcagcggcagaaagggagactcgggatccgggcctggggtcccgcggccggcccctccccactccccgcgacccgctggaacgcgcacggccggggacgcggcggggaccgcgcgggcaggcggcgcacggccggatagcgcgagggggccgcgtgaggcggtgcgacgttctgggccccaaagccggtctagcgcgcgggcgtcttccttacttccgctgccgccgccgccacatcccgggacccgacgggccgcggcgcggaggcctcggggcaaggtggggcgggcctcccgagctcccaggaccccgcgcgcttcgcccacaggcccggcgaagcccgacccgcgcggcgcccccagggccaggggaggagcctaaggacccggacgagcgccgctccagtagggtgagctcggggacgcgcaggcgggtgggtttcagcgcctgggcccctctccccgccgcggggcgcacggaaaaaccggrgaacccgcgggttttgtcctggcgagccacatcccggtgtgttttggcgacttgaagayctccctagttcgcgggagtagcgggaagagccttcctcgcgttaattatgcaataagaaggcgtccttgtgcgggatgctgtgacccgcggaattattgatattgtgcgagcctacaatttacttctttcatccttggctgagaatttgcgtttgtaattgtagatggagagaggaagaaagggttcagcttgggtccaaggagcatgcagaggaaggcagggaagaaggagcatgtgcagcttcggtgcgaggggagtcaggggtgggaatgcacgttccctgcctgaggggccccggggtgccctgagcctctgatcttcgctgtcaggaggcctgtccgaagttggaggttgaggcatgcagttctgcacttctggctgggaaggtgaaccaggttttccaaaatgtcatttttgctttccaagtctgcaaggcaggaaagggttgggcagtgaatggaaagtagtgcagccaggttctggttagctcagcggcaggactgtcataacggtgggtttttgttgttgttgttgttgttgttgttttgtctgaaaaccagagtctggggctttgggccatgaggagttgggttattgcattgcttagagtgccagagtgagaaatgtctcagacgctgttaaaattaggcagctcagtttagctctggctctctgataaccaaccacctcctccttcactcttttcagtgactgggttaaaatgaaaagacacaaagagagaagtggtcttttcccttccctccccattataattaagagcttagtccatcttggctcagaattggaattcagaattcagaattgctcttgaccctgaagaatagaatctcaaagaaatacctgagcagaaaattctcttcttcgctgaaatgaaaattggagtgtttgcaaaactgaacaaagaaaggaaagaatttgtaaacatcacargcaacttgcagttatattcggatcatttttcagtgtttgaggagttcatacaataaaaaggtgagagagagccaggaatagaaacaggggagagaggtggttgcaggaccttagagattgcagaaacccaggagttcattttcttttcatacacttctggataacctggatgtgaggaccatcaaatgccgtacatgatgtttctaacaatgatggaccacatatacaacagtggtcccataagactatactaccttatttttactctaccttttctaattttagatacacaaatacttaccattgtattacagatgcttacagtattcagtacagtaacagcagtacaagttagtagcccgggagcaatagatgattccatatagcctaggtgtgtggtcagctgtaccatatagcctaggtgtgtggttagctgtactatctaggtttatgtaagaacgctctgatgtttgcagaagaacatcgcctaacgatacatttctcagaaggtatccctattgttaagtgatgaatgactgtatataaagcttaatctttcaatcaacataataggaaattgcttttaattttagcattgagttcttagagtaaagggaggcagagagagaccgtgctgcatgtgtcccagtcagcttgggctttattgtatgttaaatgagttgtatgtttattttggtagatctcctaaatccatgatctaattccatgactttggcttgtttctggttttttatgatatggcatttggctaaaattttccaggtgctaaaggtgtaaggagtacgaaaatccagagaacattttgcattggaagaattgatcatcttgtataggaatcctataactatttcaaacataygaaacaggcataattggatttgattatttttgctacaaaaaatgtttcatttttcacactaagttacatggaagagtcttttaaacagctagtggttttggtacatttagaatattcatttaccaagaaatccaaatataacctgcctttgtaagagacccattctgccaaatatatttgaatcatcaaaatggttcactatttccttcctaagtataaaccaagttgtattaagtaagttgatcttgtaacttttaataatgcttttttttttttaattttcctatccagtgacaagaggaaacaagaacctcagttcaggggaaacacagcaaggaaatgtgagccccaggctgcagaaggtacgtgaaggagaatgtgagctcatcagttatttgagcatgccattcagtattgttcctgccttttttcttgcctgtgcagattgtaaactcttgattaggagtatgtaaatgtgtgcttagaaacgtttccttaaatataataataggagcatgctctgaggctgggattatgtgagttagtacctgctgagacctgtgcttggtacagagtgaaccccatacaggtgtttactgtatattattattattgttcatgaaaacctgtcttaactacaggtgtatttctcactggacagttaagagtgttttcattctcctaactaagggtggttaatcgttccaaggcggtaaattgtaaggatgacaacagagaagacaaaggaaatttctgtacgcagattgagagaaacctttactatgaatttgaaagtctcagtgacatgcaatagaactttatagtataaattcatatgccacactttgcattatggagttgtaatttaatgattctattgatagggtaatgcattgtagttcagaatgtgctcagggttgatggtgaaatgtccccgtttctgcagccctggtctgtctagttctcatctcacctgtcatcctcctggggttaccagttccttgtacattaccaggtttttgtgtgtgtgtgtgtgtgtgaagtttcctttagagtctggctgtgttttaaaagttgagccctggacatgtgatccctggtatgtgtatgaggtgaggttgtcagtaaagggccattgacaggcctcctcatctgacccacccctgtccctgcttgcccactctgcatgaggaacactggccttcttgccacttttggaattctgggacccagaccacagtctttgcccaggggtctgcatggcttgctcccacaatctgtcctgccttttctcaacatcctgcccatgcccttgtttattagccactgcacctgtcacctggcttgatcatatacattgatcacttgatttgtttatggcccgtctatgtctgttagtaggaagcactgtgagagcagggaatgtgtgttgctatatccccagggcctagaacagccccggctcagaggagggctttggtaaatattgctgaatgaaaaaatgtctggaaaaagcctggttaagcagagttaagtgggcttatttaccatgggacttttcagaaactttagtaagtgaatgcgcatattaaaagtggggcctggcaggtgggaggcaaactcatcagcagagtaagaaaggcgctgtgcttctggatgacaactcagacatggggaaaagctgctggcgggaatggtattggcagctgagcaaaatgaatttacaagtttccttttcaaaatgcaggggaggaaggatttgcatcaagagatggtaatagtaacatttccattgttagttattacaaacatgtacaatgtgtgctatttatcttttatttaaggtggggaagggggaagattagggcttcttgtagattcttccttccctgaccctgctttccccataaggccttaagttcttcagctgccagttcatccttgtgggttgaactgaggaaccaaaccctctggcttggtttcagatcctgacatcttgacttgtgaaaatcccatttaatgactggaagtaggaaagctctgaagatggatatgcagattctaggggtcaggaggctctgttcagggcctgcgccatgaccgaagggagggcgtgtaggggctcaggttctgctcccaccattagctctagaggcactctgagagttgtcttggctccttgaacaaaggggagttaattacagaaaatgccaggctttttaaaggccatttgtcccctagctgtagggagagcagcagcccttggcagagccctgaggaaagactctttatgtcaggccgcagtcctcttgtagacagaaataatgagccttggtggtgtcatcctcagataggaggcaaaccccatggtgaaattctgtattcaaggaaacaatgcagagaatggggcggacttagaggagctggggtgaagtgaatttggaatgcctctcttttaaaaaaaaatggggcagagttttgtgttgttttccaaagtcagacaaagcctgattctacagagtctagttaaccgtagatgggagggctgtaaaggagagtaagatgaaggcagtgatggaaggtcttagattctaattaaacctcttttagctgtgtatttggaacacttgtaattcagagcatcaatagactctcgttgactagatgcttttttgctgccaattttccttcttaagatggaaggaggtggtgggagaatggcgtttatgccagaatgcctagagtctgcattttaacaagatccccagggggattcatgtaggcattaaaatttaagaaggggtgaggtcctggaccagcaattctcagtcccagctgctcattagagtcacgaacagagctyttaaaaaatgcctgggtactgcctccagagatttgtgttgtcttggctggggtattcttggggcccggggtatcactgtatttcttggaagtttcccaggtaccgccccagacataaagccagacaccttcaggtagatgtctagattcagaaggcacataatcccgaagcaaatgacaccatgcttagctgggcacaccactctttaggattcatcaaaacccaccacaccagataatgtggatcctcgtagctcatccgctggcttctagagccacagccagagatgatgggatgtggagcacccaaccggggttgcttgtgccgggttagaattctccctcctccatgaatgaaaatgaccttgagactgggcagtggctgagtgggcatttgctttttgtacctctgactctgctgctgaagaaactgtttcaaaatttaaatcagatcatgacatcaccacccctcttttcatgtaaaactctcttcaggggctcccattgcttgcaaagaaaagaccataatagccctggcaggccccatgttgtctggcctgcatctgcctcagcctgtgccccagaactccagccacatgggcctgcgtttagttactcaggggcccattcccttggcctggaaccctgcccttcaccttaggtaactgtgctgtcccagaccactctgcccaaggcacatcccattgtattttctccccacagcaccatgtccctctcacaccatcaagtaccactcctcagatagcttctttccwtcgtgtgggcctgttagacgacaagctctgtaaggacaagaactgtgtgtgtttagttagggactcagggtcatatccttggcagctgttttactgcatgaatgaatacactggatactggataatgaataatgagcttgaagtcattatttttaggttattttgtccttaaacttgtatgcacatacacacctactcatgtttgagtgctgtattttgtaaactgtagagatattggacctgagggaagtgggtattttgagagagtactgggctgtagtcttactggttctgattggctcatgtaggatgtgacttgtagaacaagtcccagttttctaaatttttaactaggccgggtgtggtggctcacgcctataatcccagcactttgagagkccaaggcaggtggatcacttgaggtcaggagttcaagaccagcctggccaacatggtgaaaccccatctctactaaaaatataaaaattttccaggtgtggcgtgcctgtaatcacagccactcaggaggctgaggcaggagaatcgcttgaacccaggaggtgcaggatgcagtgagccaagattgcaccactgcactccagccggggtgacagagagacacactgcctcaaaaaaaaaaaaaaaaaagaaaaaatgcttattacaaatatttaaaatatgaattgtataaagtacaaaaagagctcttactgtcctctcatgattttattctatgtattacatatatgtgtctatgtttgtatatgtgtgtaatcatatatatttcacacatacatgatttttttaacaaatgggatcatacattccatcctgcaacttgtcttttttgtttactggtatatcttgacactttggatatggatctatgtcattggcttgcctttcatcatagagttttatttgaaatgaaaatgtttttggacttcggcatgatttcctaaaccccccaatcaatgtgttttaagtagtaagtgtatttgaatgcatatacatgctgtggcttagatcattttgttttcaaataatactgaagtcctcatagcatttggttgttttctagtctcagttaatggatattaaacatagaactgctctgtggagactagagaaatattttgaggttgaaagggggcctcattcttgaaaaagcctggagaccctcagggagagggttgggcaggctgcctcctgaagtacctttccacattcctgagttctagtaagttgctcaattgacacagtcattcagcaaatagcaattgttggctcatggtgcgccaggcactgtgctggtccctgctgtcctgaccagcatgagcccatattctgcaaggagagcaaatggcacatagcgagagcatctggactgtgctgggtgtagtggaggaagtggagcaaggtcaggtggcgcagagcggtgctgggggtgccacctgggtggtgatgaggcagagctgactcttcctctgctgcccatgggaaagggagcaggccctgcttaccccgagtgtacaagaagcccagtggccgggagcagctcctcagagagctccctcctggaccccgcagtgactgcccacaggctctgtggcctgcaaggggctctacagccagatatgggcatgctggcaggcagctgtgcttgaaatgctgataggggcctggggtgtaatgctcttctcaagagagtggttttggcagggctagggttttgcccctgaagctttgcaaatccacatcccccactggagtctccacgtgtcctggtaccatcccggggacaagaagcagggaaaaagcaggggaaggaggtgggaaccctgcagtccacccttctcctatcctaatggagtggccagggaagggactctctgtatatcttagtttagtaagagtttgcagaagtcaagttaaaaatggattttttgaaaatgaaatacccatgtgaaagaacacattggatgatacatggtcagttgcatgattgttgagaaggtcttctgactgatgagtgtgcaggtagctgtttgttcctgtggatgaaaaatgggagcccgaagagctcttcattgacacacccacagccacctagctagggagagggtgagtgtagaccagtccctgacctcctgcccgggtgaaagactagctacggagacggtgagtgcagaccagtccctgaccccagcccaggtgaaagactagctagggagagggtgagtgtagaccagcccctgaccccccgcccagctgaaagaagctaagagctcctgacttttaaatgaaaatccaatacttaggaaggcacatatggcttcaggagagtgcacctctcagttttcaactcatgtagttggagaaatcctatccctaggccacctggcttcctggagaacagaagaggtgctattcattttcaggtaaggcttcattatcttcccactttacctgcagatgagctcagtgggcgaaatcatattacattccttcagaagactagttccattggaaagatttgattcttaaactataaaaacctccaaagtgctgtcctgaggccgggcgagggtgatcaggggttggaagcctggagggaatgagcagagcaggcagtggaatatgcagttcccaggtcctcccgccacatgctctgcagagtcagcgcgtcacctgcaggagggaggcagtgcctcttatcgttgttccctttttcatagcactgatcctaggagagggtgggttgcaagccccaggacactcagagccaggacctgtctgtttagaattgcatgcaacctgcgtggtacatcctgttccttttactccctccccaacccaccctggtgcctctgctgcttggttagaaatggcctgcagctggcatttttcaggggggtgctctcactgtgacccatgaggatggacccccctgagtgcactgtcttagagggctgagctcagtggacttggtactgctgggccctgcatcctctggccacagtctaagcctcagtttcttgaagggaagttagcagttgctggaataagagtgtgtcttgtttttttctctcttcttggtgtagaccctactgtygcattaatttctggcaaccacactgagaaaggtgtagattaagctggaaaatcacgaagagtgccaagggattggtcagtttttactgggggtctgcaccaggccaggtgggtgctggttttttgtctacattgtctcatttaatcctcatggccactctgaggtagtggtagsaggagggccttctattagagatgggacattgaggcttagagaggttaagtgacttatggagtcacagagctaatgggtgtgagcagggatttgaaccaagtctggggttctttgtgcctcactatctctgacatggagtggcggaaggaggaggggattgtgggatggagacaggagacaggacagctggcttgcaaggaatctggcatgcccctgctgggtggtgttgctgataaactacagtacactcggttaaatgtgaagttcagaaaacaacacataggtttttgtttttgtttttttttagtataagtatatgtaatatttgggacatactttatactaaaaaaattaactgaaattaaatctaactgggtatcctgtgtttttatttgttcaacccgacttggggaacctgggaaggacactgggcctcatatctgggcacaaaaaatactggttttgggggggagtataagtatgtcttatgcaatatttgggttatacttacactaaaattttatgttatctgaaattcaatcttaacttgggggatgtcctgtatttttatttgtctaatcaggcaaccctattggtgaccccaggaaacacacgaagccttatacacgggcacctgagggtggtttgcgagccatccggagaaaacccaggcagcttggcaggtggtgagctccccactgcaggctgtattcaggtgtggccggataactacgtggtgggtgtgtcatggatcctatttgcattccagatgcctggttcctgtgagattctaggatgtaaatgttgagacaaggagagtgattcacctgggtcttcatggagctctgacccacccagggttaggaggctctctctgaaattatttgccatcagcactgtgttgaggggaccacttctccctgccatgcagaagtgatggatggcctcagtcagtcggtggaagccagctcagcccagggtcttgtctgtacgtggagagctttggcttgaagaagcactgtgttaaaggtgaaatgaaacacactttcttgtgtcacctgccaagaactgacagtgacttcccagttctttatgtgcctcctgcaggagagtgtggcttctgtgccaggctgaggaccgacatgccccgtgttgctccctggctgtgacagcatgaaaaacacccacctcagtgttctacccaggccgctgctggcaagtgggcggaggcgagaagcgtcagtgttcattcctttgcttttttagagcttctctaggtgtggctacatcttgtcagccagtyagaattttaaacacagccagctcctaattgccccagcatggcttctgcccactatgaaygaccctcagctaaggcctagtccttggcaggcctcttcctgccacctgcttccagaccatcgtgggagctcactgggaccttagcctgggcccaacaggagtcagggatcaaatgtgcaaaggagtcttattctgtgttctgagaacacaaggaagtggtcttctctcattatcatgtctctccattagggtgttctaaatttgattttattattgaatcaatcatttatattattaattcaatatraaatgttaaatgccaagtcaaactacctattgtagcagtggaaaaaaacggaaatatttgtgctgatacttactgactgaaatcacctgtcgttttcattcctctttgttgacttgatgtatttgtaagcagcaggggcatctcgcttgtgttttccaggaagagtcagtgaatggctgcggtgtgacaacatgcaccaccagtggcttctgctggccgcatgcttttgggtgattttcatgttcatgktggctagcaagttcatcacgttgacctttaaagacccagatggtacgtatgcttcatggtggaacgaattttggctaatttagacctagctgcaacactgttcctaggtacatgcayagatgacttctgtcacagagtcaaaggactttcatgccagcagggaccttggaggtcatggcctccgttccttcatattacagaggtgtgaggggaggtagggtgggaggggctggagggtcttttcaagcatctcctctggaggaaggaagctgctctttgtggctgaggcctgggtggtgcctaggagcaaggagcagggtctcctcccagcagcacagtggccttatgccttgyagcagggcgcctctcaggctcgcagttgggaattctctttgcctcatgtcatcatgagaggtgcagcctcaactgcttggcatgcccgtgtggtggccacatgtttgaaggtcaccctccatgcagcggaggagggtcatttaaatgtatgtcttcaggttgtcttggaggctttcttagctctcctttactgaacgtaggcattcagatgaggacggataaagagcgccaaattgggtctcagaatgctgattctacttcgtgctcttgtcatttgcttatctacatcacaatgtttcttccaccaaatggacaccctgcctgctccggcaccgcccatgattgccctgagcatggtgaggtgctctgtggtctgtggagtgctggatatgtccaaagaggtgtgtgatatgctctccagccccgaggccacttcattgagtggccaagcaggcaagcacgaggaagccagacacatggagtcattgaagtcctcatttgtgccgtggattggcccattcctttaggctgattgggagatactggggaacgtggatgagcacagcactttgctgtgctctgcaccgtactttgtcctcctgccgatggtggccttggaaaggggcagttagagatgcctctgtgccagcagttcttcctggaggctgcactgacctgtgctgtctgtgtgggacaggcccctgctccacctcacagagctcccaggcatgtccctggctgtgtcaaggactgcccgatgtcctacacctcctgccccatcctctctctgccccaccttgtctgcagagggacagcaaggttagaagggaggtctgcagggaaaagagggacaccctgaaattagcccacatggtggttctccccatgacagttgttgggccctgattggctgtcatcacatgtcctgcctcatcctccaggagccctggagagaaacctgtgaggtctgcacagcctcgggaggtgatattacacctgcaggtatctgggcaggtgtcactgagcatgacagctcacgcccgggactcggggttccgtcagcagagcaagggtcgattcttggagggttgctggaatgtgacacgatgatctcagtttgacagtttggacatttccatggcagcttcagcacagtgccatgccactgagagatccctcctgaagccctagagccgggttctcatccccgcagcacttcagaatcacctgtgggactttacagacctgctgctgcttgagacccagtgaaggagaatcactaggggtggggcccagttgagaagcacagtggtagatcctagctggagaactgaagagaaacagagctgctgagaataagaaataggtgttactcaggattctcctaaatgtcacctcctggtatggaaggcactcaaaaggcaggtcatgaggttaaattgtttatggtttattttgcttaaaaaagtaggagtagatgtaatacattttagtgagacttctataggtaatagttaaataagacttgtgcctttgtgttttactgttatctggcagaatggcctctaaagaatgccttgtttcccagcggcatctggtaaatgaggtctcattctcctttgatgtatcaagtttygtgctgaatgttttcagtgtagacactgatcctggaagctaagcaggggtaggcccggttagaaaaaaagcaagtgtaggcgcagaacagggttttgtgaagcggagaaaaggagtggtaaggagtgttaggagataaaacctatgaagaaagatgaagggctttcggattttacacctggagaggagcacygcagcggtccttaatactgcctgtgagatctttccagccggctgccttcaggcgagtgaaagggggcactttccctgccctgtgagatctggtgtggtgtgtgggtgctgggtcactgagatgggagtgctgcccctgaccccgaggcaggggctgctggtggtgaggatgctgttggccgcacagtgtgcagtgaactcagtgagaatcttctgttgtgggcccactcccgttgcggggtgaccaccacagcactacccagcctgcctcactcgcgtgagatgttacctaattgtcccaagggacctggttaggttaggatcctgaaggtggatatccgccagctgagttctggatgcaggatgcgagctggcacccagcatcttgccagtgcacaaggacgctgggctgaagcatcaagagcatttacactcagagcctgcccctgcaggcgtcagagaggccctgggctggggtggtgtaggcctctcccctggagcctgcccttccagcactgtgctttagagagtgtgtcccggagcctggatcttgggcagcacaggaacccctctaagctcgtggccataaagggyttctcacatgttggagtttatttcacacacgttcacggtgtttttgattatgaaccagaagcccattgtgaagtgtcaagaccaggaaataacagacacggcagtgtccacggtggggagttccatttcctggaaagtgcgtggagaagccttggcctcagtgctcccgggctgctcctttcagctctgtcctctgggacagggccagcctcagaacccccatcagtggtgtgcatgttcttctcacctacctgcctttcccggtttctcctgccactggagcccctaggaagagcatggttgtcgtgagttgctgtttaaagcaacacttactttttttagtgttacagtttctgttcagctcagcagtggagccagtgatatttgtggcaatgatttatcctcagttagcaaatttcagtatcatattgaactaggatcaggtgttgtaactagactttctcataagaaaataaatccccctcagcgaagggaatgtgatggaatcatatggcaagactcaaaatgatgcccttgtggacctggtttgtgtttgtaggcgctggtttttcctctcctggttgacttcctcattggttctgagccgcttgagggcagagcctgtgatgtgaaggtctctgyagccttgaccatctttgcatgtacttatttgccatctgcggatactctccagtgaaatgtctgggtgtatcgtacctattttctaattagattggttggttttttaattgttgagtttgaggattctttatatattttagataggagtccttggtcagataagtggttcataaatattttttccctatctggagcttgtcttttcctcctcttcaaatgggctttcacagtgtagattttctctttggttgttttttaaaaagattgatggttttatgtttcacattcaggtctgtgatccactttgagttcattgttgaataaggggtgaggtttggatcaaggtttgttccgtgtgtgaatgtccaggtgccccagcaccatttgttggacagactgccctcctccgctgaatggcttttatggctttgtcaaaaggcatttgggcatctttgagagcttctatttctggggcctctgttctgtcccatccacctgtgtgccttttccttttagagaagacattcaacctctctgtcttccagtgtacagtgccaaacaggagtttctgttcctgacaaccatgccggaagtgaggaagttgccagaagagaagcacattcctgaggaaytgaaggtgggcacagccaggccgtggtccttgtcctcttgaacacggcacccttgtcgcggggagctggccttcccctgtggctggttccgcttgtcatcacgtctgcgttagagccttttcctgtgttacttctccatgttagttcaccttgttaatttccatttgggagaggcacaggtcacgtctatttttgtgcccctcacagagctctgtgcatcagggctgctctgtcactgttggttgtgcagcattcctgaccagctgaacatgagccttgcctggggagccgagagtattgggcagggtcaggaggaaaccagaagtgggagaagacatctcacccagtcatggggttttagagtgaaagggggccctggacagcagaacaactaattcagcctccaaattgtatggatgagagaactgagcctagaaaaaaggtggatcctccacagtcccatggagttcctggcggagcccaaggctgctgacttccacccagcccttgctggcttgacattctggctccatggctctctgcaggcttcttgtgcacctaaattcctgatcattccctagctgggatgaggggtgcactctggaaggcctctcacttcgtaacccccattctggatctagagggttgaagttgcaattgttccagaaggaatgaaatgggtacagcgagccctaaaaatatttttagcccagaatcaagccgtagaggttgggacagctcctatccatgggtcacagtgtaaggatgataaattagaactcaataaacatagaaaacatacaccagtcagtagagtgctgctggaggttacttctcgtaggacattgatggaatggaggccaagtttacagaactctgagacagcctaaatgttgcttttaggttgaggcatcccagggtaagaaaataatttggatggggtacagaaacgaaaccaaaaaatcttatgggaaataggagagtggctttaataggatggatttaataggaaatcaaagttacatggataaaaacaaaggtagggtaagcctttggcaaagtgtcgcaacaaggttccctcaaggatgccataccctgtgaggaagagggtggtcatcttggtgctccctctccgggtggagggtgctcccggagagattgccagcctgcaggagtcattgcaaataaaaagactgcgcctgaatgtgctttacagtttgcagtgtactttactgggtttcaatctcattggtcttccgagccgccctctgaggtatatttttattctgtttgcatttgggaaacatgaggctcaaggaactgtgctcactgggtcagtatcccctggacagcaagttgtgggcctgggctttgaactcagtgtcctctgtgcccctctcttacccgctgccccagtcattctcatgagactcagatgggaggtgagggaagtgggggatgtcagaggtgatgtccgctgaggccacatgccgttaggtgacaccaaaactcagcatgtgtcttctcacaagaaaggggatttatcaacatgatcagattctgtagctcacctttaaaagtttattttggccaggtgcggtgcctcactcctgttatcccagcactttgggaggccgaggcgggcagatcacctgaggtcaggagttcaagaccagcctggctaacatggtgaaaccccatttctactaaaaaatacaaaaaaatagccaggtgtggtggcatgtgcctgtaatcccagctactcgggaggctgaggcaggagaatctcttgaacccaggaagcggaggttgcagtgagctgagatcgtgccattgcactccagcttgggcaacaagagcgaaactcggtctcagaaaaaaagtttactttgtgcatggtgtagccgaatgtttgaatggaaaatagaaaataatatttgtctttaagttggctttgtatatttccaaagggaaaaaagaaaacaatgctcattcttacacacaattgaacaagaaatcttttttctttagctgggcatggtggcttacgcctataatcccagcactttgggaggctaaggcaggagaatcgattgcgcctaggagtttgagaccagcctgggcaatatactgagacctcatctctacacaaaatacaaaaatcaggtggttatggtggtgtgtgtttataaccccagctacttgggaggctgaggtgggagaatcacttgagcccaggagttggaggctatagtgagtcatgattgtgccactgcactccagcctgggtgacagaacaagacctcgtctcttagaagaagaatttttgtctctaatgctttgctaaaagaaaagcaatatctaatatcttttctttgttcaaagaaaagcagtatctaaaagtgcagagttttctgcattttctaaagggaacttgttgggaggtgctctctcctgatgcgctgttcttgagtgccatccatgatcagggttaggtttggaacagagagggaggagaagacagagaggctcttttgggataagtgagcaagaggtgggatggatgaggaaatgaggttaaacgagacccgttcttgtaagagcaaggagagtgcctggcgtggctcctggttttccatggtgggtggagggcccgggcagccgctgatgccctgtggggaggaacggaggccactctgcaaaggggcctctcgcttccccagtgtcttcatctcgaaaagcaggcagtcagtagcccccaggatgctcttcccaccaccagggaatcccaggaaattcacttaaacacacaagggagaaagcatcctggccagaggtcatgagtgtaagagagtttggttacagtagatccataaaggaagagctgggtggggggccctgaggggggacctctgtcatcctgatagttccagcgtcccggttctagtgtgttctagaagtcttatgtccttcccattttctaactgacgttgtcccctgggaggacaggttgttaaaactaccctataaatggatttcctggcaagcccagtgcattttaaaagatataacaaggatatttgggtccattcaatacaattatttggaaggatcatctgctttgaaattttgggaagttctgtgtagctttaagagatagatatggccgggcgtggtggcttacgcctgtaatcccagcactttgggaggccgaggtggcggatcacaaggtcaggagatcaagaccatcctggctaacacagtgaaaccccgtctctactaaaaatacaacaaaaaattagccaggcatggtggtgggcacctatagtcccagctactcgagaggctgaggcaggagaatggcgggaacccgggaggcggagcttgcagtgagctgagatcgtgccactgcactccagcctgggccacggaacgagactccgtctcataaaaaaaaaaaaaaaagagagagagagagatgtagcagctgaagccttaaaaatgctgagaaacagggccacaactagagggggccgatggggttggtggaggctgccctgctattcaggaatgccctcaggatgcctccagagaacaaggaggtgtgagcagcaaggggactttaactcaccgaggacagggggcctctgagcaacttctgtgtgtactggcacatctccctgtgccccctccaacccatgcacacacaaggcctctcacattacaggtattctcttaggttctaaaacagccctgaaaagaatggaccagcatgtagaatttgagctttttcatctttttccccctagctagaggattccaaacttcttactttggtttttaatttcttttttcccccaagacggagtcttgcttgctctgtcgcccaggctggagtgcagtagtgcgatcttaggctcactgcaacctccacctcctgggttcaggtgattctcctgcctgagcctcctaagtagctgggattacaggtgtgcaccaccacacccagctaatttttgtatttttagtagagatggggttttactatcttggccaggctgatctcgaactcctgaccttgggatctgcccaccttggcctcccaaagtgctgggattacagacatgagccactgtgcccggccttattttgttttttaaagtcaaacttctctccaaagatctgaggaaccaagcttgcattcattttccttgcccagcctgccgatcgggctggtggagaggctctgaaggcctcatgaaggggctggggatagtgggtgtcactctgtagacagacaaggaagggaagaagagaaggctccagatggaaaggaggggatagaccagcaggagcggctctgcttggcccggtcctgcctcctttaatggtccctgggcctcttytgctctgtgtcacctgcagccaactgggaaggagcttccagacagccagctcgttcagcccctggtctacatggagcgcctggaactcatcagaaacgtctgcagggatgatgccctgaagaatctctcgcacactcctgtctccaagtttgtcctggaccgaatatttgtctgtgacaagcacaagattcttttctgccagactcccaaagtgggcaacacccagtggaagaaagtgctgattgttctaaatggtgtgtrtgggtctactgaatgtccactgggaagggtcttggtggccggtgctgaggaggctggggaggacagcaaggaggagtcacaagagggctggtttgacctgaagggactggtggccktccagacaggcctgtttttgttgttycctgttagtgttgtgccttacaagktagtggggctcgtttagacaccgattcttttcaaaggggcacagccacagtccagctctcctcacctgtcacagcagatcctcactttaggtggctcgcccacccccaggcccccctcctttgtctcttcaggttccctgtgctgatggttatagtcacccactctgtccgacatccccagggccccacactcgcagagccaccaggaagcctcacggtcaccctctctgcagtgagaagggctcacactgtagagcctgggaggggagccctggcccggggcctggagcctctttacctgcagaccaagcgttctgtgccagcgagcaggaagaaattgtaccccatttcacactaagcatctgtgttcagaggattgagtcagcttgcttcaggaaacctgatgtttgctagggaacaaattagatcatcacaaagtaacctcatacactgcagttttgattactcactactctttttagagatgtctatttatttaaattccaattagtctgaaccgatcctaataattatgggctctgcttaygaaatttagcttcagacaggagttagttccagtcaacagcagtgggactcctgggtcagaaatcggattttggggcaccatgggtaggtggccctaaggctccatgtcctgcttgccactcctgatgctgcccacagagtcggtggtcactcctggccactgtttggccttcgcaggggttggctgggagagagaatggtggcacctcatcatctggttgtcacatataattaatgtgcttctgcagtgattggatagcatgttgggttttcagaagcagaatgaggctgcaaatcgaattgaaaacaaggaatatacaaaggctcacaaatcagccaccacagtgtgaagcagcatactttaagaagtaaacacccacttagaagggcagcatagaaatcagagtgggcttgctggatcatgtaatacagaagcgggtggtccttgtggctatcttcggtaaccactagtgcacctggatggggacaggtgcatgaatgggcccatatgtggacccacagagctggttctgtcattgtccccttgagagcagtgctccccacgyctagtttacagccatccatagcatgtaccgcagagttctggactgggctttaaacactcgggggaggaatcaataaaacagacaagactgtgtccactggtcagatggcccagggagattcttccctgccaggactccaatcttaaccctaccggattaacacaaagatggatattaaggcttacagaaacttggagaaaacctcagcatactgacagtgtatttccatttgtctgtattgagaaaagagtgaaaaacctgctcagccaccaaccctaggatggtctctgcccaagttccattcagcagcctggacctgcactggtccctgatgacagaccctggctgttggcacggccctgccttctcgacataccttgtcctcttttgactcctgtctcaaatgtatcacagctcccatagcttagtcagatttttccagcatcaaaaggtctttgctctttgccagcctgggatgctgctggggtacctgagagccactgtgggccaggggcatgtggtgcttggagagcttagcctgtctatgggatggggctgtgaagctgctgcgggcatctgttagcatgacgttccaaagtcctgcttctctggcattttcccccagtctcagagtagagtaagtgttgctggtgttaggagttctgtttgcatgcagcgatcttcctctaatggcagatttagcccagttaggtccattgccaggggtaggcactgccagcatttccactcctgctccctccccctcctccctgaaatcatcagtttcctctagttggcttatggattcccagaagcttttcttcactcgttcatcctgctggcagaagcagttgaaattcaaagacctaaacttggatattgggggtgggcttgtcatgcacacgtggggaacatgaggcccaaggtaaagatgaggtaaggacatgcccttctctaaggggcgtactggagcagccaacctgccttcctttccgtttacttcccaggagcatttycttccattgaggagatccccgaaaacgtggtgcacgaccacgagaagaacggccttcctcggctctcttccttcagtgatgcagaaattcagaagcggtgagaacagcttcctcaaagkggaggggggagtttttgtaaacctgagaagaaatttggggaaaaccccaggctgagttctgtacttggcagrttgatcggaggaccacagagggctgtcggtttgcatcagtgagaggcagctaagctacaccccccattcggcgcctcaaaactctcagttccttctgagaatttccagccttaccttcacacagtccattaacatgaaggtgacatcattttrttaatagaaattagcaggcaactttgttctgctttggtaaagttttatagattgcttgctgaatatgatcttttctttataagaaagggatttggattgcagagatctcactgagtatttgattctcccagaggcattgtgcccactgctgtgggagctgcccctgcagtggttgtgtgggctgcatccagcatgggcagggtagagagacggaacccctgatcgcagcaaggacggagtccaggctgggcgcagtggctcatgcctgtaataccagcactttgggaggccgaggtgggcggatcatttgaagtcaggagttcaagacaagtgtgactgacagaaaccccgtttctactaaaaaaaaaaaatagcccgctgtggtggcacacacgtgtagtcctagctactcaggaggctgaagcaggagaatcgcttgaaccctggaggcaagggttgcagtgagccaagatctggccactgtactctagctggggcgacagagcaagactctgtctcaaaaaaaaaaaaaaagaagatggagtccttagctaatagatgagaaagttctcatgtagtagctctcaggtggcccaggagagcaaggctgaaaaggagtgaggatgcaaaagcagcggctcacgtcaggtcaccagctggattttgcctcctgggtctgcagccacctgccttgcatggcgcctgacctgcatggcacctgcccatccttacaacccttaccagagatgctcctggtgaggagtgtcctgctgttgccctgagcactcatggggcttttgtgagactcagtgagtgaagacacggcaaagcacagagagcagtttctggcctgtcktaatcayaccgtgttctgtgatgtcactgttgtcatcgtctttgtcatcgtcactgctgccggccctcctccccagggccatgctctgctgccgcccgcttgcagctcacccagacctgctcctgccctctggagcgtgaagcctgactctctgttttctcttgccccccttcccctggcaatttgaattgaacttttaaaaatatgcccttaaagtaactttccctggcaccatctattcctgactcagagttcctgcccttatgattttctgcccaggaacaaaatttgtaaacattcttgaagttttgaatcattcaagtaaaacagaaggtagattaaatagatgtcttcacagtgactgcctacaatgagtactgtggccttggacaggtaaggttttccaagcctctgttttctcacctgcaaagtgtggtaataacaggattaatccacaggatcttggagtagattaagagacgtgtggaatgcattcatggcagcctcggcacgtgagggtcccatacacagtgctgcactccgctcattcttccctctcccgccccctcagctgtgacctcctgtggcatcaagttaacctcttgttcgtttttttccttagattgaaaacatacttcaagttttttattgtaagagatcccttcgaaagacttatttctgcatttaaggataaatttgttcacaatccccggtttgagccttggtacaggcatgagattgctcctggcatcatcagaaaatacaggaggaaccggacagagacscgggggatccagtttgaagatttcgtgcgctacctcggygatccgaaccacagatggctagaccttcagtttgggraccacatcattcactgggtgacrtatgtagagctctgtgctccctgtgagataatgtacagtgtgattggacaccacgagaccctggaggacgatgcyccatacatcttaaaagaggctggcattgaccacctggtgtcatacccgactatccctccrggcattaccgtgtataacagaaccaaggtggagcactatttcctgggcatcagcaaacgagacatccgacgcctgtatgcccgtttcgaaggggactttaagctctttgggtaccagaaaccagactttttgctaaactaatgcataagacctatgaattcaaatatctttattagacctggggctaaccaggtgaagatctgagcccagaaatgacccttcctccaccacacccctcctttgaggaygcccggggtctcccacaggcctgtgagttgcctcggcatatgacgcagaaccccaactgttacaacttagtttggatgtaagatgctctgaggaccctgcccacacccctgcgtgcattaggatgtcgctggcctttgctcacctcagaggggagaaaaggctaaagatttgcagtttgacagcccagcagggaggaagcatcacacagcgttargagccgttyccttcaggtgttaaggaaggggatgcccctgaggttctcctggctagtcrgggtggcttcacccatcactggtgggttgcaggaacagcacccaggactctgaggagggacagagaagcaagggggctgctgaaatcrcagagacttttgcagcatcagatctgaggagtaaaacggcacctctggccttcatcttggtgctgcgacaattgtggaggcaaagcattctttctgtgactattttgttcctgtagacagtcagcgatggccagagggtggtgtggtgtccagggrtccatctttccagaatccatgcctgtgtaatgctggtccatgcttctgaacctgtgtctgccaagcgcctatttcattcagcacaagacatacgattttagaaggtgaggggaggggaggctttttctacctgagaaggggagtgtctttgagggccttaaaaggaccatggcccaggaatgggggcgctggttgggcttggagctcakgctgctgtggatcccggcgcatcagttctgacttgccttacctgggtggacagcagtgaatctccacctgtcttctccagggagctcccatgttggggctgaagacgagcaggggcaacctgccagcatcacagaattcagtgtagtttatacatttcgattcctttcatctcagcaaaatgggcactgccagagccatttctgatcacaccaccatcctggaccatgtgactggaaggtgggtaaccaagttcaccagcaataaaacccagcgcccaggtagcctccagcagtgcggcttcctgkyaacaaggtaggccctggtgcagggcaagccgcagcgaccatttcagataccgtccacagccaggaccgctgagaactgggacagtttcctgggatgagtgccagcctgagcctgcatggtgccgccgagcccggggtggaggagggagccaggcttcgcttcaaggcggcctctaccttttctcagaatggtttcctgattgtgtcaatgtgaaagttaaataaaatttatgtgccaaacctgacatgagctgcggttctgggaagggtgcctgtggccacgcgcgccccaggcaggtggggtaggcatgtgcgcacgcatgcatagctgctcagggtaagcagaccgcaggaggcccagccttcagccgccatggacacgcagggccgaggacgccacactgggttatttttctgtaacgtttagcaaagtcttgttacaatttcagaccaaatgagctgattgattacctctttgctgtttggaatctaactgtggatctgtatatgaatggaaggccttaaagctagtcttaattaaaatagtgttttccctcagaaacaaaattctggcccctggggtggtctcttcctcccctttggcatttgggtcattttcctaacatattttgccacacaagtggagattgctaccatagtatctcctggacatctcactgtgtccacagcaaggatgccgccaagcacggcagcccaccccgttcatttctgcacagccagtacccccactcccctgtcccctgacttccttctgaggctccagatccactaactccctcctcagcttacagcaggtggtgcacctccttctgccccctgaggcaccaccatgtggagggctctgctaccctgtctgggcgttcctcaggactgggctggatggtggcacagctcattcccaggcagtgacaccagggtgggggtggctggagtaggcaggcctagggggacctctgcactaacagcctgggtttgagagaaacaaacagcgaccctgcctccaagaagtggtgctagggcccggagggcagttcctaaattaggaagtttaataatacgaggttgacttaatgggtttgtgttttagaccgcttctctcctactggatttcactcctagcgcgtgtcaggtttattggtcttgtgttgagaaccactacagagaaatgcccagagctgagatgagatttgattttcacagtggctgactgggtgcacacgaaggtgtgcactcayggcctgcagggcacccaggtggcctctgccctgggttcctgaaaagaagagcctctgacacagcactggggggggtcctccctttcaccccccagctttctcgctctaaaccccggcatgctttgctcatctggactctccagaagcagggaacagaaagggaaaaatcaagacagcagctaaatgtgaggcgaaggcagcctattggactaaactcaaattatgcagcatagtttcccaagctcctcggacatgccgagaccctcagcaggatggtgcagttacagggctgagcagaaccgcaggctcataggagatgagaggcctgggaagtgccaggacaaggctgcacctatccagcttgagtcaggaggcttcaggcaggtgaggtagccacacttggggagcattacagaagggttggccagaggagaggatgcccagggggatggaagctgcatccaaggtatggcgggtcggctgtgaaaaatgtgggcgcccagacaggaaggctgggcagcatcacatagggcttccaggggtgtgctcttcccctccgggaggaggggcaaacacaaggcaaccaacagctgtgatgattggggtgatagggggttgtccccaaagctgagggaggagcatgcaccagtacagactcacacccctacagcaagtagttggtgcctggaggggaagggcaggtagcttgatgtgaccaggaatggctgtgctctgcaagtttgggtgtcatttgggtaataggggctctggaggatttattttttctttttattatataaatttaaaaatatatgttggctgggtgcaatggctcactcctgaatcccagcactttgggaggccaaggcgggcagatcacctgaggttgggaattcaagaccatcctgaccaacatggaaaaacnnnnnnnnnnnnnnnnnnnnnnnnnnnnnnnnnnnnnnnnnnnnnnnnnnnnnnnnnnnnnnnnnnnnnnnnnnnnnnnnnnnnnnnnnnnnnnnnnnnnnnnnnnnnnnnnnnnnnnnnnnnnnnnnnnnnnnnnnnnnnnnnnnnnnnnnnnnnnnnnnnnnnnnnnnnnnnnnnnnnnnnnnnnnnnnnnnnnnnnnnnnnnnnnnnnnnnnnnnnnnnnnnnnnnnnnnnnnnnnnnnnnnnnnnnnnnnnnnnnnnnnnnnnnnnnnnnnnnnnnnnnnnnnnnnnnnnnnnnnnnnnnnnnnnnnnnnnnnnnnnnnnnnnnnnnnnnnnnnnnnnnnnnnnnnnnnnnnnnnnnnnnnnnnnnnnnnnnnnntggagacggagtctcactctgtcgcccaggctggagtgcagtggtgcgatctcggctcaatacaacctctgccttctgggttcaaacaattctcgtgcctcacccccctgagtagctgggattacaggcatgtgccactaatgctggctaatttttatatttttagtagagacagggtttcgccatgttggtcaggctggtctagaactcctgagctcaggtgatccatctgcctcagcctcccaaagttctgggattgtagccatgagccaccacacccggccccacagtttttgtataacaaattccctttctcatttcatctgccccttgccccactcacttaccgtgacttgtatggtgcacacacctgagaagctcagactggggatttgagtcccagtactttgacaccagagcccacagcattgactgccagctacattctactgactcaaatccattttttttaaccctgctgttctttggttcattgcccttcattcatctgaccaccccaccaaggcccccaacccagtgcctcccagcagcagctccccttggcttctcagcttgctctccccattcaccatggtgtctatttcaacattgtctatttttctcaaacttccactccattctcatttactgtgggcagatgaccttgtccccgacagagggaacaggtgccatcagatgagcattctccaacatactggctccacacctgcaaacttcctgtatccacacatcctctcccccttctactacagtgggcggggcttgcctcccaccttgctctgcacctccccacatctgttccgaattaccctcctgctctagtgccagctcctgtatctgcaccccttctccccactgggctctttcccggtggcattcaagcacgttcagggctctcgaatcctaagaccatcctgccttagctctttccccatcccacatggggccctgccttacctatcacccccactccatcttgaatctagcagttttcagggcagtcagtcaattttccagattcttttcttctgtgcatcctttaatttctattgcttcccagtattcttagctcagttcttttctgtcaccactctctctgggcaaggaggcctccctgcagatcttcagttaccatctgtgtggaaataagccccatggggacccaagaacttttgtgtgttttgtccgctgtggtagcacaactctctaaaaacagtgcttggcacaaagttctcaagacttttcgaatgctgatttagacccaagtttgtgccttctgtctgcatgtctttttgagcttctgacacttataccacctgcctactaggtatttcctcctggttgccccacactcatttcaaacttattaattcctgagcagaaccttcatcttccccttcaaacctgttggtttatatgtggccatgatttcagggaacagtgacacaaaccatccaggtgtctgaaccagaaatctgagtcagaatcttggacaactccttcttattcactcctcacatccaatcagtcaccacttccagtagattcaactatttacaggttttgggttcccggccacttctttccatcccttttgccacctctccagtatgggccactagacgtcccaggcgggccacacccacaaacacagatgcctgccctgctgctccccctgcctctgcctctgattttggccacctgcaatcatttctttcttttttttttttttttttctgagacagagttttggtcttgttgcccaggctggagtgcaatggcgcgatctcagctcactgcaacctccgcctcccaggttcaagtgattctcctgcctcagctgcctgagtagctgggattacaggcatgcgccaccacaccaccacacccggataattttgtgtttttagtagagatggggtttctccatgttggtcaggctggtcttgtactcccaacctcaggtgatccgcctgcctcggcctccgaaagtgctgggattacaggcatgaatcagcatgcctggccccacctgcaatcatttctataccccacagctagagtgggttttgtcaaataaaactctaattgtgttgctccttagctgaaactgttaaatggctccccattgctcttagaaaaaaagtccattttcttccacataaagtacaaggtctttaaggatttagactctggttcctctgcagtctcatctctcaccatctccttcactttcactccatgcccaacccataggctttggctgtagccatctattctcatctccatgagtttgccatggcctcttgtcatctccagaccttgtcacaggctgttccttgcaccccttctcttcaggtagctaactgctattcatcccttaatatccagctcagaaagcatttaggaactcttaagcccaagatgcccttccttgagatacaattcatcctggggcaaaattcctgtccatctgtgaacctatgaccagataagttacgtgcttccaaaatacaatggtgcaacaggcacagacatcctcatgccaaaagggagcaatcagaggaaagaaagggatgatgggtcccaagcagttccaaaacatagtaaagcaaatcacattagggtttatggcttaagattaatcttttttggtttgatgctctgccctccagacccactggagcagtggtctcaccttccagaaccactggggtggcaaagtcactcccatgacttggcctgttgccccacctcctatgttgcccatgctggtctcaaactcctgggctcaagcaaacctcccacctcagcctctcaaagtgctgggattacaggcatgagccaccgcgcctggcctctgctgtcgttagtgtcagctggcagtgtttctgttggtatcatcccatttctgttcctggccatctctgttgagatggctggttaggtccatgctccacacccacactaatctccttatcaaatggtaggtcagccatacccttgttctcttctgaacatgttttcttattttttgcaacatagactgagaatctcaaaatcttttggctctggttcctttttgcttaataattcagtcttcaagtcatttctctcttcttgcattttactacaaccaatcaggagaaaccaaactgcttcttcaacactacttagaaattgcttcagctaagtacttaatgtcatcacttgcaggttgtaccttccacaaaacactggaacgtcaacataagtcaggcaaatcctttgctgctgtataacaaagataacactttctgcattgtgcgatgtcattttcctcacttctgtctgcgacctcactagaatgacctttaccttccatatttctaccaacattctgttcataattatgtatatattctctaagaagatggatgctttctgtacagctctcctcttttctatttttttttttttgcaaaggagtcttactcagttgcccaggtggagtgcaatgacgcgagctcggctcactgcaacctctgcctcctgggttcaagcaattctccggcctcaacctcttgagtagctgggattacaggtgcccaccaccatgcctggctaatttttgtatttttagtagagacagggtttcaccatgttggccaggctggtctcgacctc

SEQ ID NO: 95306 - DNA, 45425 bp, Homo sapiens
cgcgtggagcaagagccagagactcatgctccttgcctggcagtgtgtcacaggttctgcatgacagattacatactttgtattatgagaggagtgggggtgggtgccaagtcggtggccccagtgaccctcacgccacctgcctggcattgccgcaggccaagccaagccgcctgcactgctcccactgcgatgagacctacacgctcccccagaacggcaccatcaagctctacaaggagctccgctgccctctggatgacttcgagctggtcctgtggtcatcaggctctcggggcaagagctacccgctgtgcccctactgctacaaccacccacccttccgagacatgaagaaaggtgagtgcagccactccctcctgtccacaggtagctgcagtctcttttcagtgccaacccctgccttgcaccaggctggactctgaggggacccctcaccctggcctttcctgcactcattggcactgagacgagagaccctggatgtagctggggcactgcttaggcctcagccagtggtgccaccctctctctgtgtcagaatcgagcaggcaaccctagtccaccctcaggacctgggcacaggtgtgcagtgctccctctggagctgagtgagcaagaggatgcagcagtcgggggacccacccggtgagcgggcacccccagtcagcgtccaccaccgtcctccatcctcatcctcgtcctcattactggaggagggagcgcatgtccaggcaggcaggacagagcaccgagccagaccaggaatcagcgggagtgaggcatctgcccacattcaccgtgtgctctgcagaaagctccctcaggcctcagtctgcacccaggctgccccgggagtgagaccccatccctgccctcctgctgccgccagagtagctgacagggtggtcccatgtggcccagtgacatgagggtcatgtggcattaccagtaacaagctggcagcaaagcaaaggggggatggagtcagctgaaacccactgggatggtgccagcgaggggccttgaaagttgaggaggtttcaggtaagcagaaaacaggggtaatggcagccaggagccgaaacatgagcaaggctgtccccaagagcaaggccaagaagagttccttctgctgggacgagggatccaggagcttgaggcattgggagcaggcagcagagggcaggtgggcacagtgggcgtgcctttacagggctcccttctcccgccaggcatgggctgcaacgagtgtacgcacccctcctgccagcactcgctgagcatgctgggcatcggccagtgcgtggaatgtgagagcggggtgctggtgctggaccccacctcgggccccaagtggaaggtggcctgcaacaagtgcaacgtggtagcgcactgcttcgagaacgcccaccgcgtgcgggtgtccgccgacacctgcagtgtctgtgaggccgccttgcttgatgtggacttcaacaaggccaagtccccactcccgggcgatgagacgcagcacatgggctgcgtcttttgtgaccccgtcttccaggagctggtggagctgaagcatgcggcctcctgccaccccatgcaccgcggtggaccagggagaaggcagggtcgagggcggggccgggccaggaggccccctgggaagcccaaccccagacggcccaaggacaagatgtcagccctggccgcctactttgtatgatgaccctgtcctccctcacccaggctgcagtgccatgcagacacctcatggcacttcaaactattaaaatgcattttatcttatccagagctggggcccctttgctggtgcagcgatgtcagagcgttaccgtgtccctgggcacctgtggggccctctctccctctccgaaacccaatacgtctcccttcagcctgcatacacgtgcccagagtgctccctgctatccctacaccctggcagtacgggcagggatgccccaaccctgaagccctggggaatagacccagtttgcactcacaccccatctcaatccgtgctgctgatggtagctgtgtgcacaagcagtggccctgatgccttaaggaaggcggccttgacagctgtggctccggcaggagaggagtctagtggagcaggtggggctgggagaccccctccccggatctggcttatgaatccccttggtcttcgctgcagccccctgctcagggccacgctcttgaccccacgcttctccgtcccctgctccctgctcccatctctgagaagccctgtacatggtgcccgtgtgcgtctggcagcttcccaggacctgctgcaattcccattctcacaacaaggccttatggtcttagaggcagctgggtgccccatggaacccattcacatgccaggtttagaaaataccctgtaggccagactgccctgtggtgccaggtgctggtggcagctgccctctgacctcagtgccttcttgtgctcccctccccagccacccgaggagagacacctgtgcgggatccactgtgtgttggaaactccctccacactccgcccgtgcctcattgagtgatgacgggagctcagcaaaacagctttccagactgttcagtgggacctttctttgaggggcaggtcaggaatgtttcggactcagacccgcccccgccccaactcagtagtagattcccaggctgcaccaggacttatatgagagctcctgtaaggaaacccagagcccaccaagcataccccacctggacccccttcctggaggccctcacaggttaacacgggggttccctggaacacagtttggagagctactcgaagctgaatgaaaatacagagacatggggaaccacatagagggtcctgggatgtgtctcagaagcacaggcttcaggaaggagggggtgctctcagagcttctgccccctcccacccactctggtcccattctggggccctagcaaggccacacctgttaggtccccagtgcggggctgtgactctgctcttccacccacagggcccagtggacctggagccttctccgcagaaggtttcaagacctccaggacccttaggttatagggctcattcaggcttggaggagcagagacggttcctaggtcttaaacccagaccacccagtccttccttactatgcttctgcactgcgctttcagccacaggcagggctaatcacaaagtgttcctttattttcctctgcagttgtcccttgtgtgtgaccctccttcaaggcccttggcttccgcagcttgattctgcactccgagtccattcaccttctcccatccaatagcatccaaccccgctgctactgctgccaacctggccttgggagcaatgaggacaaggaagggacaagaccccttttaggccagaactgccttcagatcagccacgctccatgggactgtacctctgccctggaggctggagaggtcagtggctgcagactgtctcaaggagcccctggccctgcccacctagccaggggtgcagccttgccagagaagcagagaagcgtctgtggctgggtgggtgatattgaaagattcctttcaccagggtggaagccaggatctgaggcgtgatggaatgtggacagtgaggcagtgacagcgccacaaggcaggagtcatctccaggcacgtccttggcctggagcccatagggacaagctcctggtggtgcctcactttgccatcctctctaagccgcagaccttgaatggaatcagtgctcaagagtctaattgggcccactctgaggatgcctgcgggaatatcagcttttaccgcaccacactgcactttacagtgtgggagggcctgccccacgcaccacctcacctgtactgcggttctcaaacttcaccctacagccattctgttgtaggtgatctcaggggcagtttgagaaacagtggctcagggtctcacagcagccctctgagataggttggttgctattgtcccgattttttctcatcaagaaactgaggctcaggtgagctaaggaatgtgcccagggccactgtttataagaagtagcctcaagccttgctcatggttactgccctgacagggatctaggaaagagtgagcaggagaatgggatgaggcaggaccctccgccccagccctgctttctctgcccagacacctcctgccttgcagacccaaccccaccccagatggtttcctttccagtcacccagctgctagttctccaggttcctggtctcactccaggttcctcctgttagagaagcatcccagagacattcattcctggcaaggacacaggcctgcggacctgaaggtcaggtgggcagagccacataagatctggtgccccatcctccatttaaaaaattatactttccaacggcattggtataaaggtgaatatattaatatcatatattaaaacattttctttgacataaaggtttctttcttctgcctttaaaataaaatattttggccaggtgtaatggttcacacctataatcccagcacttgggaaggctgaggcaggaggatcacttgagcccaagaattcaagaccagcctgggcaacatagagaccctgtctctacaaattttttttaatcagctgggcgtggtggtgcttgcctgtgttcccagacactaggaaggctgaggcaggaggggagggtcacttgagcccaggagtttgaggctgcagtgagctgtgatcatgccactgcactccagtgtgggcaccagagaaggagcttgtctctaaaaagagagaaaaagaatattttcaagagcctctgtgttggcagaaaaatggcccttcagagatgttcatgtcctatacctgtgcctgtgttagattacatggcagacccggcatagtggctcacgcctgtactgtaatcccagcactttgggaggccgaggcaggcagatcatttgaggtcaggagtttgagaccagcctgaccaacatggtgaaaccccatctctactaaaaatacaaaaaaaattagccgggcatggtggtgcgtgcctgcagtcccagctactcgggaggctgaggcaggaaaatcgcttgaaccagggaggcagaggttgcagtgagtcgaggtcatgccactgcagtacagcctgggtgacagggtgagactccgtgtcaaaaaaaaataataataataataaggggcaaaggggaattaaggttgctaatcaactgatttagagagatgatgctggactatctgggtgggcccaatggcatcaggagggtctttagaagtagcagaaggaagcagaggagggaaccagaggtggcagtgtgagaaaggctcaactggccattgctggcttcgaggctgtaggaaggggccacgagccaaggtatgcagggagcccttaggagctggaaaaggcaggggaacagtttctcccctagaatcctcagaaaggaacgcattctggcgatccctggatcttcgcccactgaggctaagtggacttctgacctccagaacggaaagataacaaaagcctcaacgtttgtggaaacaaacaactcataatgagcctgggactgtgcctccttcccggacggatgagcctgcctgggcagtctgggtttgcatccctgctctgtcacttaccagctattgacggcagaagttgcttaatttctgggcgctgtgacctagggattgctttccccatccagccgcccacccaaagctgcagaagagaagcaagaggctggtgactggggcggctccggagcccaggtggagccgcagttcgcctaccactaaagggccgcagtcaccgtccacgtagccgccagggggcagcagaggtccggccccgccagcctggaggcccgactgcgcctgcgcggcgcccgcggcgcccgcggcggccagggacgggaagtgggcggggccggccggcagcagcttgcgggacacggagccgcgaggagacagctgaggcccgcggagaccaggggtgaggaggccgggggggacgggattagagggctgacggggctgggacgagggtcaggcgagcgcccaaggcgcacaggggtgaaatgggaccgaggaaccggaggggtggaatcagagggctggggaggcaaggaggccgagacgaggctcacatgggtgcaccgaaagggtgcgggggtgcagtgcggggggccgaggagcaagaggggccgctgcggacatgaggaacccgaggctgggagttggggggctggggagccaagggggcagaactggggggcaggcgggggtgtggccgagccgagggcctggtagggaccgagggctatgaggcagaatcgggtgctgagggggacgcgccccattttccgagatttggcctctccccaccccccaggagcctctgggccggcacgttgccccatatccccccagtccctgcaccttcaggggcccagtctgcctgatggcccccggctccgcggcctcccaagcgtccgtgaagcgagcgtcagctgcacaagtgctcgggctgcagctgcttcagccacaggtctgtgagccagagcctcaggcgcggaggccgggcacattgccgctgggttcggtcaggcaagcccctgaacctgtctgtacaacaggaagaactggctccggctgcagggatttcggcacagcgcttgacacacagtgaggcccactgcatggtggcgggctccttcgaagccttccaccctgcgggacagagtcacacatgtcgtggtggcattccccgggacaagttctctgggcccagctgagctctcaccacgggggatagaaagtggggccggccagcactctgaggccatctccagtctcttctgttgtcaaatttcgctcttttcctcctgcacgcgaggtggaaataccaaaggcattgggcatccagagaccttgattgagttcgctttgccctttcacctgtgtgagaccttaaatgggtgcttgccctcctataacctatttcttcatctgcagtgtagcctgacagtatgtacttctcagcgtagttgtgagaggtaaacaaaacgaatgcatttctgaaagccatgaacctctacacaagttcatttgtggaattcctttaagataccccctgaaggccgggcgcggtggctcatacctgtaatcccagcactttgggaggccgaggcaggcatatcacctgaggtcaagagttccagaccagcatggcaaaatcccatctctactaaaaatacaaaaattagccgcgcgtggtggcaggtgcctgtaatcctagctactcaggaggctgaggcaggagaattgcttgaacctgggaggcgaaggttgcagtgagctgagatcccaccattgcactccagcctgggcaacaagagcgaaactccctctcaaaaaaaaaaaaaaaaaaaaaaaggataccayctgacctgaagccaaccgagtcttttaagacctggcgctgctgcccactgcacccttcagagtggtgtagcttcctcagcccaygccacccgccagtcactcttccctctgccatcacacttaccacctgctgtacacaaagggccatcgtgggctccctgactacagggagcttacagtctatcaagaaagtcaggcctgtagaaagaaatggtcattgcacagcaatgtgactatgcttaatgccatggaactgtacgcttagaaatggttaaaaggatacatagtgtgtatattttacaacaataaaaaaaatttatatatgtagaaaaaaaatctaggatttacatctaactattattagtattagtagttatgaataaagaaataagaatctcttttggtagaaaaaggttggccaggcgtggtgtctcatacctgtaatcacagcactttgggaggctgaggcgggcagatcacctgaggtcaggagttcgagaccagcctggccaacatggtgaaaccccatctctactaaaaatacaaaaaaattagccaggcgtggttgtgggtgcctgtaatcccagctactagggaggcttaggcaggagaatcacttgaacctgagaggcggaggttgccgtgagccaagattgcgccactgcactccggcctgggtgacagagcaagactctgtctcaaaaaaaacaaaaacaaaaaaaaacagttaacatgaatgatgcttttgttacactatagtggtgcagttcccttttctaaggattgctgggtttttttcattaccttggttctgcagttaagcaagactcaacaagtattttttctatgtcccctaaaaaactgcagttgttaaaccctgcattcgttaagcttaggagtcaaaactaatgcactagaggaaaataaatattttaaattaaaaaaaaaaaaactttttacaagtcagatgtgagcaaaagtgccatagagacatgaaagagagcatgctggatccaaagatggggagatttcagcaaagcctcaaaggatctgagagatctcgggaggcaaaatggaaggagggcaccacaaaacaaggaggggaggggctgccctagggtggggggtacacagaaatggaaggaggagccatgagagagccaaagcccagagctggtggccaatgagggacaggtcagggatagaaggagtcagaatgacttcccaggtgtcatcacagttaaggcccaggttycccagcatgaaccccaccctgggactttgggcaagttccttagctcttctgctacagcctgccctgtgaagtggggataaccacaagaggttgttgggaggctaaaagccatcccaggaagagtgctcagagcaggggcggatggcagctggcagcaccgtcagccacacccctgcagctgccccccgatgagtttgctttgccatttctcacctatgtgggaccttaaataggttctaggagggtgagcacccatttggtgtgcagtggggccctgatccaggaggaaccagctgccagtcgcatttggtcagactggyccaggcaggcggtgctgggatgcaggagtccaatgtccctcccatgcccaccccgggctcttggtgatttgcacaggctcatgcacacgtccctcttattcggagtttttcactggtgtgccctgctcaggaaagcccagcaccaggctccgctgcctctggtgctctcccagctctccctactccctgcggcttgccgctggcctccatgccattcctgatgctgtctcttccagttgatccctcaaagaaccacagcactgtcccctgcccctccaggcactcccagggctgcctctggtttcccttggtgaggaatttctccttcctgccgggtgtgccatggtgtacgtcagattcaggagcttattgggaaaaggaaggaaatgattcctgtccctttcgacatctgggctccagggagagaaagctgtgtcctggtttctctcctcaccccttgccttaggttggtgatgcagaaacaagggtgcttggtccccagcaagtaagatggccctgggcaccctgcctttgtaacaagagcaggcagttggcacaggccctgagagtaagccagcctgtcccctctacagatgcagacagagcttcacacacacacatcatcacaccccccagaccttacttagtacacatggcacagacaccattgaggcatgtgcagatagtgggcacaaggcacagagagagcaggcaggtggccacagtgaatcagggtctgtagtgcagacaggaggagccaccctccctgagggaacaggccgattgtggggaggggctcacggcacaggaaagagtaccccaaggtcaggaggcaagaaggaggcacctgcatcccaaaaggtccagcagacgtcaccagcaaatggggtggaagtgaagggtcttgaattctgcccttgacagtggggctttacactgtgggcaggggtttctccaggggggccctctgtgtgctctagcggggagcatgctgtcctctcacttggatcctaatcataaattcacatgagcacattttgtggtgagacagtagagcctccagatcacttggaattgcaagggagtgggaggaggccccaggcactggcagttgctgggggcagctctgcatcgttcacattctcccagaagctccaggggccagggcagtcccagscagaagaggggcccttggccgcttgcactgcttgagggcagccaagcttgctgggaaattcacgccatcttcgaatgccttacagctctgctggggcatggctggcaggacgtgccgcctcctcattgacctactagggctcccagcctctgctcatttctccagctcacagtcttccctttgtcgtttgaatgtcagygtccctcctgctctcaaagtgatttttccttttttgctttatgttctttttttttcttttttggtagagatrgggggtgggggggrggtggcgatctcactgcccaggctggtcttgaactcctggcctcaagcactcctcctgcctcaccctccccaagcgctgagatatagacctgagccacagcgccttgccagttgttttatgttctttatccttttacctgcttgccttctgtaacctgggttgcattaaatttactcctacttgtgagtaaatgtgaaccatagcaataaatttagtctatccccagaaccttcagtagcaagcacccctattcctacgttatttgtatgtgtccactttaaataaattacctttcaattctgcctctaaaagaagagaagggttttgtgttttgttaatttaccacccttcaccccttgcattccaaatccctcactgatcagacatttaacttggtgctgggacctttccctctgcccaccccattctcttttgtgttttttatctttaggcttccagaaggcttgttccaagttagcaattcctgataaggacagccctcttgtgggctgtgagctccctgcatctcttacttcccactctcttcatcctgcacctcaggcccctgccacagccgcccttttagcaaagtttgtaggcagagtctgtggctattctaagactgatgattctagaagattctccttgccttcttcgttcagttttcagaacctggaagtcctcatgaaggtgatgggctgtgaaactgttccccaaattctccaccctagaactcggggtgttcctcagagtctcatgtccgtttgtcaccataaaagaatgcagtttttctccctggcttaktaactgtgtaggatttcttttttatttttttctggatccaatctcatccactactgcgtaggactcgctgaataaagtttcccagcctgagtgttagacaaagcccaaggtggagtccccgctgtggggagggtttggaggggtcaggcacccgagaggaagggggcaggagagagaagggtccatgctgagtgggtgctggcagggaggcccaggtgtggggcctggaggtgaatccccggggcgacgcaaagaacatggaagggggggcgctggagagctgtttgggtataggcaaggcaggcaggctggggaggcgactatggagattcggagttaggagagaagaggagccagagccaccctgggaggaggctgtgaggcaccatgtgcctctttccagtgagagagaagccggtgagggagtgaaggcacaggctttgcgatccctctttggccctgtcttccttctgacacctcaggcgagggactaaccctctccaaaccttgggattctcatctgtgaaatgggggcttgtcctggctcctggggtgttaggggcaactcccagggctggtcagctctggtcatccctaaggacttagggaggaagagcccacatgccgcacagtggggtcagcgcctggaactgtccacagtgcccctcttccagccagggcttagcaggcctgagccattctaggctcacaattccctcctcctattagagagcattgaataggctcgatggtgtcccacagcacctcctgtctgtcccagattaaacctctgcttctctcctggccaccccttgggtggccccagcagcctctggggatcccttcctgctcccactctggcctatctccaaaacagccctgggccggcctcccgcatcttggcccttctctttcctcccctgaacaccrctagagccccaacaggtgtccctcctgccatctggtcaccacgtccaggctcacagacctggtggcttcactccctcacctcagagccctcctggctgctcgggacccgtgatcaggttgaaccccctcacctacctcagtgcctggcctcggcatccctgtcctgctcgtctctggccacgctggccaccctctgccaggaacagtcttcctcctctgtcacttcttgacaatgtccacccagctgctgctcctggcaccayctcctgagaccggatctctggatgcccacaagtccccacctggactcatgtcaaaacagtggccagggttgtccctccaccctctagtggccctgaaccatgaggccawgcacctgccacatggtgcttgcaggtgggcacctgcattgctggtgccatggccccctgattctgctgactctgacatttctccccagggtgaagcctggagaccctcttgccctggcctagctgcaggcccccgggatgctttgggcatgtcctctggagccccacagaagagcagcccaatggccagtggagctgaggagaccccaggcttcctggacacgctcctgcaagacttcccagccctgctgaacccagaggaccctctgccatggaaggccccagggacggtgctcagccaggaggaggtggagggcgagctggctgagctggccatgggctttctgggcagcaggtaggcctgtgcacccccaaaggggacggggagtaagggcacggcaccagggccracaagggatgtggctgctgctcccctacacgtccagccccacacggggatctgcagccccggatccctatgcagcaccatgtggaactcccgtggctgctatggcaaagcaccacacactgggcactcaacacagccaaagctcattctttcacagggctggaggccagagtccaagatcaaggtggcagctgcgccatgctctctcaaaggctgcagggaagagtctgcctttctgttagtgcctggccttgacttcctggaggtccttggcttgtagactcattcctcctagctggccttgttgcacacggcatctccccatgtgtgtgtctgtgccttcacacctccccaccctgcctgctgtgtgtctgtgactcctcctcttgtaaggacatgggcattttggaccaggggctgccctcctacagtgtgatctcatctttctttttgtggagaatggggtctcgctatgctgcccaggctggtctcgaatttctgggctccatggatcctcatgtttttgcctccctaaatgctgggattacaggcatgagccactccagccaatgtgacctcatgtgaacataactaattacatttgcaaagactttaactccaaataagatcatattctgagccacagggggctggggcttcaacataccttttagggaacacaatttattgcatagcagctgataagcagtacgtcctgtttccgatccgtgtgatggacgaggaggcagaggtgggtagatgaagaggctggcctgaggccttacagtcaaggagtggcagagccacatggcaccccagccaccacgatctgagagatagctggcactgtcccccttccacaggtgaggaagctgaggcacagagaggtagcacaactagccgagcagatttcggggaagatagagagttgggtgtccaccggcagacagtgtgtagctgtcgcctaggctgaactcagaggtcctttccttggaagacccttgccctccccttcatttattcattcattctggaagcatttgtcccatgaaagatggtgaaggacaaggtcttttctcgaaccctctctgctcagacagggtcttggagttaggctgtctgtctggcacaggggacagctcatggaggtgagcaggctggtgggccgcgtgctgtttctgtgaacctagtcccttgctgaggggatgtgcgcatggtccccagtcccagcatcacccaaatcacctgaaatatcacctgaagccatgacaggccctcagccatagctccctctgacagagccaccatcctcggtggctgcctcagtatcccccaagtgtgcacttcctttgccccttgcagcgaatcaactctgttcctgacacccaccaagggcctattttccttgaccccaggccctagcagagtcagtgacttgtgctctccctgtgcaacatgggcacaaacattgctaagtgtcagccacatgcaagggctatgccacccagcatcccccacagctgcctagagctcaggaggaaatgtccggtgaccacgctccatgaggtcatggcatgcgcaaagggtgttattggcttgttttgaggaaatattttagatatgtggcacaaagtgaatcagcccccagtggtggagcagagtgggcccagcaggggtgccaatgcaygggaggtgaggaaaggcctcacgttctgccttcttgagaggagcaggtggcactctgcagggagcaggggagtccagaccagggagttctgcagccactgggtcttcgtggaggtggcatggggccattgctgccttgaggcaaaaagccaggcccgggacagaagggttggtgcactttggcccaagcatgaggtgaccrggcaaagccaagcggtgccagccccaagctggggatcagatggaaaagccatcccggggaacaacagagcccaggggtttgctgggcctgcgtggggcacaggtgctgaagacggacaggccgcagcaccggggtgacaacatcagccttcagttcctgggcagggggagaagggcgcagagcagggtcccagggaaggatccaaggtgggagggcctggagggctgaggagtgagtaggcagtgcaggtgacctgcccaggagggccccgaaccaaagtgttggggtcagtgctgggggcgcaggggagggcagtgggttttggttttgatgcgagagcagccagacttgttgagcggctgctgtgtgagccacctagtgatgggtgcgagcaggaggggtgcagagctcccgagtctcctcagcccccaggaacccaccttacatggtgaactaaaatggagtatttgaagttgttatatgttccagccatcttattggatttattttttaagttatttttgttcttttctagcatcttctttcacacgcaggtgtggatgtgcataggtgtagtcagcacttggggtctgagcctcacacgttgtctacactaagcctggctgtccacacacacgcactcacatgtgcccatacacagtcacgagttccacctccgagctctgcttcccgtgtcccagcctgaggaggggctcttgggcatgaagggctttgagcatcttggtccctgagctctttcacagaccgtaaaaggcatccttctggaggccatccaggagtcagaacatccagtccacagggggctatttacgccttgtctccgctcttgtttggagcctcctgtcacatatttgagtccctgagcagtgcataccgtacactaatgatttgagtgtggtttttgtctctgccactagactataagcctcttgtaacagcccctgccccaaggtcggtgagacgtgtttctcaggcacctgggccttgcatacaccttggcttgtccctggagcatcttcttgccttgtgtaggagcctgctctgcagggaccagaatcagggtggatctgcatggtgcagtgactcagggctgagggcctctagggcgtgtcccaggccagaccctgggatgaggcgggagctgtgtccaggaagaggacgatggtggcccttggccaggcattgtctgggtccccacagccggaaactgcctccctgccccagcagcagtggcgggtgggcaggaagctgaggcctggcctcaccgggaccaagggaaacaggcgtccttcctccctgctgtgcaaaaggaaaacccagcagttggcaggaaacccccaaatggcagaggaactaatttctcatgtcttggctggttgtttttcaaaggcagttccagaggcttctcccatgagtcaccctttcattttaaaaatcacgaatctgctgagcatggtggctcatgcctgtaatcccagctactcaggaggctgaggcaggagaatcacttgaacccgagaggtggaggttgtggtgagctgagatcacgccattgcactccagcctgggcaactagagcgaaactccgtctcagaaaaaaaaaaaaaaaaatcaggaatccatcccggtagattcctcagaccatcagtagataccttgggtgcccagcccccatggaacaagacctgtcagcctgtgctgttggaaggtcctcgccttccagttaaagccgggagtgtcggcccagtgcagaatcacctcgccaccccaggcatgctcccctgacccccactctcagggacaggcacacaggggtgaatgtgtgttgtccagcttccagggcccccactgggtgagaaggcagattccaggggtcaaaatgcatgttagaggccatagggccactgagggagcgaccccttctgcccagaaaagccagggatggctcagaattttagacactcctccccactgccctccttctcagccacagatggcttcagtgtttctttccctgatctgccccgtggctctcttctgccctgcctacctgctaaaagacgctaaccytcctgtcggtttgctttcagcctgctgcgacctccctttctacccactacgcctcctcaactrctcagctctgttctatgacattgaaagcagtgacccaatctcacttcttaaaacatttccttcgtggcacccagaaggccactcctggagtcatccccactttgctagccatgctctggccctgtgggactcagccccctatcctcattcattccgcagctccatctcctgcccagaccatgttcttgcaggccctcaggcctcttgacctccgtggaacacaagtcgctgtggaaacagagcccattgcccatcccctgcctgactcttccatccccatcagggtaattaactgtaccacgagccttctagttgctcagaatagaaacttcaacactgtccctgcccctccatttatactgccygactctgtctgctcctgtttgtcaccatggccctgcccagcccaggtcttagactctctcctttagacagtcgtccccttcttgccagcccaccctccacaccagggtcagagaggcctaaaagccccatctgatcatgccatgtccctcttcaaacagaccaaaggcggccaggtgtggcggctcacgccattatcccagggctttgggaggctgagatgggaggatcacttgagggcaggagttcaagaccagcctggacaacatagcaaaaccccacctgtacaaaaaaatttacagattagctggacatggtgatgtctgtagccctaactactgcctgtagccctaactactctggagtctgaggtgagaggatctcttgagcccaggggtttgaggctgcagcgagccatgattgcacagctgtgctccagcctgggagacagagcaagaccctgtctctaaaaataaataaataaaacacagaccaatggcagtgcttccctgttagcataaagcttggcctgccctgttcccacagcccctcaccccggcagctcctatggccccatccgcccagggaccttgtggaccacgcacagccacttcctctgctgagtgtgcccatgggtcccacaccccaggatcagcttcctggagctgctgtacaaatgaccacagacccagcagcttaaacaacagaagtgtgcttcatggtgctggaggctgtcatctgagatcaggatattgacagaactggctccttctggtggtttgtgggcaacccttggcattccctggcttgtaggttcatcccccaggtctctgcctcatgttcccctggcattctctctgtgtgtgtgkctgtgtccaaattcctcccccaacctgttttttttttttggagacagcatcttgctctgtcgcctaggctggagtgcagtggcacaatcttggctcactgcaacctccacctcccaggttcaagcaattcttctgcctcagcctcctgagtagctggaactacaggcatgcgccaccacacccggctaatttttgtatttttagtagagatgaggttttaccatgttggccaggctggtctcaaactcctgacctcgtgatctacctgccttggcctcccaaagtactgggattacagatgtgagccaccgcacccggcccaaattccctttttcatagagacatcagtcattggagtaggggcccagcctgctccagcatgacgtcatcttaactaattccatctgtaatgaccctgtttccaaatgagctccattctgaggtactgggggttagggcctcagtgtatgaatttaggggggacacaattcaacccagaacactccccaccccccagggtccccagctggcatgggtgattcctctgccctcctgtggccaggagccatcatcagcatggatgtcaggcagtttacttgcccatcaacagccccctcccaactagccgcaggctcaagtatggtccagctccccaccagatggttgtgcgtctgcctttgctgtcctgtgaccttcctgtcccagctccctgaggacaggggccgccctgctggccgtgacccctcagcatgtgggctgacagttggggaaggggggctaggtgtggtctcctgctgggggctgcccctcacttccccctcctcatccctaggaaggccccgccaccacttgctgctgctctggcccacgaagcagtttcacagctgctacagacagacctttccgaattcaggaagttgcccagggaggaagaagaagargaggaggacgatgacgaggaggaaaaggcccctgtgacctgtgagttctgtttcttctgaggtggccccagggctgcttagcaggcaacaaagggtgacgacattgtgggaagcccattgattggggtccctaagggtgctggggccctcgctcacaacggcagcagaatcaaggagcagagaaggcttgcggccccagtgaggtggagggtggcggtcacagccctccacaggtcatatagttcccagtcagcccacgaggcaggggtgggtggtgcagacaccctcctgtgtcctgtctgactgaagttccagaacagcccaggaaattaaagatgcttatcccgtttcrcagaggatctcacaggtgatcgatctctggtcatgcagccaggttcaagtgccctcagtgttgtaactcagttaacatgcgcccgggcaggcgaagtcagggttggccaggtggcatgccagcaggtctcggggcagcagcgtggtcccctcaacgctcgggccccctgcctcagctgcccccaagtcaggattctgttgggtggagacgctctacggtgtccatgagccccatggttagatgctggtggaagcttgtctgtcagcctgctcctgggacagccataagcatggtgtggccaggggaacccagaaatggagagggctgcagatccatttcacagaggatataatcattaaaaagcagggcttttatttcatgtgactttctttcattctcctagtaatttcattttattatatttcgccaaagtgttggttgatgttagaccagaaatacagggcgtaagaatcgcaggctgcagcaggggtgccacaagggggtagcaacgtcccacccagctgaatagttgtccctggacaggccagcaggcagcagagttgcagtggattttcccttccttgccatttcctgtckgccatttcctttcccttcctttgccatttcctttcctttccctgttgttctaaattcggcattactagtgcatgcgtgcatccggggaaaaggaacaaggtgggagaagagagagaaagcgaatacccgaggccgccagcatcagtgggtgcccgcgctctcctcctcgctctcgtcctctgccctccgccctggctccctgcccgcattccctgggagcgcagccttgccttagcctgggagacagctgtccacagtgacaggcggccattgttctcggccgagccagcaggcttccggccggtggcagctgctgctcctccgctctgcggccccaccaagggggcgccgccaccgcccaggccctccccgcctgatgggtctctgtccgtccacgcgggagacagcgccacctgccggtgagaaggagcgttgctgcgccggcaccagcccagtcctacgctcggggctcctgcaggcctgggaaggagggagggcgcagctagaaggaagtctcgcctgcccttgcttccccgtctgtcagagtgcctcgcatgcaggcctgcctagcggccttgatcatgctctccctgtcacggaagtagaatgtagtcaagtttttggactccaagccattcttacaaaattgcgtcagagtggggattgtattataagaattgccactgaagagcagcgagtggctgaaacctctgtgtggctgccagtcagcccctccccggtgactggatcagcgaagaatccagaagcgaggttgcgrggctgcagcccttggcatggggagtccgtgggctgggcagcactgcctcagccgctggcctttcctgagcagagtctaggctaagcggctgttggaaatagcagtagcacccggggcragaccgtgagccacagcggcggccggagtctcccccagcccgagctcaggcctggtaagcaccaggagcccacagtttccagagggagtgaggaggagtccatggcatttaggggcagttttctgggcacagtggccctcagacgagaggaagaggaggcagcgctacaaggactggcaggacgaggggggtttcctgctggtttgcaggggatccactggccaaacttgtgtggagctgccttccctgagctgggcctgcctgaatgagttctcaggcccctccttcacccatagccttgccagtccccagttcttgccaaatgcttgaataggcccctgtgttggccatggcggcagcagctggctctggatgcccccacccctgccttgatgcatggattcccaagaacctgtctttctgtgacctcctgcgtgcataagccctcgcgttcatggttcttcctcggtggccccctctggcctcagcccttctccttttcttccacagcctccgcctttaggcaggagctctttcctcctctcagttccccatgtcctttgggtgtggcctgtgacactcaactcctgccctcggctgactggccctgattcaccatgcttgccrcatgcacctgggctggcaggagttccaggagagtttgtgcattgaagtgacatgagtccctgaagccagagcccccatggtttcctttgggcctgttactggttgatcttttcttgagaagccaagcttaggtaggatttgggtattttttcttttcaaatgagtattgtggcttatattatttgttgctacataacaaattgccccaaatgtagtggcttaaaacaacagacatttattctcccagtttctgtgggtctggaatctgggagcagsttagctggttctggtccagggtctcttactgggttgtggtgacatggttgctggctgggctggagggcctgcttccacggtggtttcaacacacggccactgacaggaggccctggtcccgtcccatgtggactctccgtggcgctgcttgagcatcctcacagctcagattgagcgatgagagggagggaggaagagagtgagaatacacaaggcgggaggcgcagggcctctttgtttcgtaacacctgaagcacacgcagtcactgccactcttcatcagaagcagccagctcccacactcagcagtgggaagtgagctccacctcgcaaaaggggaagtcaaagaatttgtggacatgctttaaagccactgtcacacgagactaacacttgtaatgaaaaactggggaagtattaagaaagtgtacttcaggaaaaagctgtccgtggaactgccacgtgcaggcccactctgacaccttggttgtgtgctgttcccgcctttttttttttctggccctggtggtttttcatggacttgtagttaaactgcatatgtaattttccttcttttttcacttagtatcatgacagaagcattttacatgcttataaactctattaaaatccattttttagttttctgttttaagagaccaggtctccctctgtcacccagactggaatgcagtggtgtaatcggagatcgccgtaacctcgacgtccttggctcaagggatcctcctgccccagcctcccgaatagctgggagtagatataccaccacacrcagctaattttttttggtttggtgttgttcatttgcgactgagtttcgctctgttgtccaggctggagtgtagtggctcaatcttggctcactgcaacctctgcctcccggattcaagcaattttcctgcctcagcctcccaagtagctgggactacatgtgcatgccagcacgcccagctaatttttgtatttttagtagagacggggtttcactttgttggtcagggtggtctcgaactccggacctcaagtgatctgcctgcctttacctctcaaagcgcgggactacaggcatgagccatggcgcccagcctgtttgtttttaagagacaaggtctctttatgttatccaggctggtcttgaactcctgacctcaagcagtcctcccacctcagcctctcaaagtgctgggattacaggcatgagccactatgcctgggctagttttttttaattaaactttttgttttgagataatcatagctgcacatgcagttgtaataaataatacaaagagattccatgtatactttacccagtttcctccaatggtaacattttgcaaaactataataaaatatcaccaccaggatcctaacatggtcaaaatacagagcagttccatcaccaggatccctcctgtcacccttttaaggccacccttatacccccacccctacagaccccatccctaaccactggcaactactaatcttctcggcttctaccattttattatttcaagaacacatataaatggaagcatatgatgtgtaactttaggggactggtttaattctctggagattagcccaggttgtttgatgcatcaggagttcattctttgccattcttgagtggtattcaaaggtatgggtcgaccacggtttgtttaaccatttccacgttgaaggacatctaggctgactccagattttggctgttccagataaagctgctatgaacatttgtgttcatgtgttcaagcttttatgtgaacagycttcattgttctgggataagtccacaggagtgccacggtggggtcgtatgggagttgcatatttcgttatgaaaatcatatttaatagcagcttaattcttcatcaagagactagatcttttttttttttttttttttttgagacagagtcttgctctgtcgcccagactggagcataatggcatgatctcggctcactgcaacctccgcctcccaggttcaagcgattctcctgcctcagcctcccgagtagctgggattacaggcgcccgccaccatgcctggctaatttgtgtatttttagtagagacggggtttcaccatgttggctaggctggtctcgaactcctgacctcgggtgatccgcccacctcggcctcccaaagtgctgggattacaggcgtgagccactgcgcctggccgagactagatcataatttaagtattattcctttgtcattggatatatagtatttctaattaatgggcaattataagtgattctgtactttgtctttaaaattatttttgtgtttctgatgatttcttcagggtgggttcccatgagtagagttgctccatggtgggatgggagacttcaaggggcaagttgccaaactagacatttctaattctggtaacaggctgccatgtgcgcgttattgagttgatgtgctcacaatgccccgggaggtgatgggggctttgcaggcccctgtgggagctgtcagggagccagygaggcctcagctggcttggttggcacttccctgacaatccctccattgtgcccatcagtgctggatgcccaaagcctggcacagagtttctttaacygcctttgggaagtcgccggccagtggcagaagcaggtgccattggctgcccgggcctcacagcggcagtggctggtctccatccacgccatccggaacactcgccgcaagatggaggaccggcacgtgtccctcccttccttcaaccagctcttcggcttrtctgtgagtgctcccgtccagaccctggggacagcttcggaggaccggggcgagggtgggggccccccaggtaccgagaagagctgcccrccaaggctgagacaggagagacacccgtcagcccctgtacttgcccagcaagagactaagaagggcaacagtgtgagtctgttatgagggaggcctggatgccacgttcccctgactcctgcaccaggagccacctggggcagcccctcattttatgcttgtagcaactcataacagatggtgaaaccgaggctcccgcgagctgtccttttccaaacctaccccctcatacgcacataagccgggcgaaggccatactgattctcccagactctaccccatcagtgcctggcgccaygccccactgggagcaccctgggtccckcgggtctgtgactcccaccrcatccccaccaggaccctgtgaaccgcgcctactttgctgtgtttgatggtcacggaggcgtggatgctgcgaggtacgccgctgtccacgtgcacaccaaygctgcccgccagccagagctgcccacagaccctgagggagccctcagagaagccttccggcgcaccgaccagatgtttctcaggaaagccaagcgagaggtgaggactggccrctgggcctcaggtgcagtttggaggccagtgagagtcccagcctctgcagcgggaaaaacgccaaaggggctggtggtgctggaaggtcctcactaaacactgccggtggtcctgccattttttctaaaggggcttggttttcacttgaacggaagcagcacaaagcctgccccgacccagcatggtgggcctctcagccacacagacctgcctggcgcagagggtctgctggcctcggggaaggcagctgtggtcaagcgttcctgggattttgttttaatgagatatggcaaggtgacagacacagaccaggaccttaacaaagagtctactactcacagttcctgagaggaggggccacgcctcacagagccatgcatggaaagcactgaggtagtcggggcgcagagagaagagagggaagctgggccagagccgtctctgcatcctccccaggtatttgctgtctcgaggaatcagctggcctgggaaggggcagcccctccaggaccagcaaggccccaagttgtcaaagcatcataaaaggcggaatatgtaaaacctgattaatctactgccttcctccccttcctcctctaggcagggtctcagcaggctaccgacgtcctctgggaacaatccttcctcgggagttatagccatgtgcagggatgaggcatttgtttctgaaagaagaaagaatacaaatgcatcaggcccctcctctgtgaacttagccactctgaacctcacccacagaatttcactaggtcctccttgtagccctgtgaggtgaatactaatattgtacccattttagacattgggaaactgaggctcaggttgcttaaaagacccgccccagtgagaagacaccaggggaaaggtgcacttttgtcacacgctctgagcacagaccttcatggaaattagcagagccaggctttgcatctcaayagaaaaccatgcaatctctgcagctgcaaggaccccagtgaaaagcaggcaagcctccactcctggcctctcacctcagccccaggaagtgacaaaggcctctgagctcaaggcagcctcagagtagaaaagggattctctgaagcaggcgtaactgctttattgaggctgggcacagtggctcacgcctgtaatcccggcactttgggaggcagaggccggcggatcacttcaggttaggaattcgagaccagcctggccaacatggtgaaacctcgtctctactaaaaatacaaaaattggccaggcgcggtggctcatgcctgtaatcccagcactttgggaggctgaggtgggtggatcacttgaggtcaggagtttgagaccagcctggccaacatggtgaaaccctgcctctactaaaaattaaaaaaaaaaattagccaggtatggtggcacgcgcctatagtcccagctacttgggaggctgaggcatgagaatcacttgagcccaggagatggaagttgcagtgagctgagactgtgccactgcactccagcctgggtgacagagcaagattttgcctctaaataaataaatagccaggcgcagtgactcacgcctgtaatcctagcactttgggaggccaaggcaggcagattgcctgagctcaggagttcaagaccagcctgggaaagaaacatggcaaaaccccgtctctactaaaaacacaaaaaattagccaggcgtggtgctgtacgcctgtaatcttagctacttgggaggctgaggcaggagaatcacttgaacccgggaggcggaggttgcactgagccgagattgtgccactgcagcccagcctgaatgacagagcaagactctgtctctaaataaataaataaataaataaataaacatctttattgagatacaattgacaggtagtaagtggtgcatatttgaagtccacaatttggcaagttttggcttatacacatatacacctgtggattcctcaccacagtaacggaagtattcatcacccccggaagcttcatcctgccccgtgtcatcctctgcccttccctacctcctctcaactctcatgggccctctctccctgcagcggctgcagagcggcaccacaggtgtgtgtgygctcattgcaggagcgaccctgcacgtcgcctggctcggggattcccaggtcattttggtacagcagggacaggtggtgaagctgatggagccacacagaccagaacggcaggtaaggggatccctgcgcccaggcccaggatattcctggcctccatcatgctgggcccataggggaaccccacccagcctgggaacttcaggtagtagtaatcctggcacctttcaagagggagggctccctgcctgatttgagtggccgggggtcccacgtgagcccttcctgagagctctgtgggtcacagctmtatggagcccagagctccgggggagagcagagccctctgcactgacaggcatcccagtgcagtcagtgcagcccagtgcagaccagagcccatcatacacacggacaaggaggccacaggctgtgggtgaggaaggcctcagggaggtgatgctgccccgaggctggagggaacctggcttggggctgtactgactagaggctgcctgggaccctggcactcaggtcatcacctggacatgaggatgacagtcccactcagacctcttctcagaagactgtctcatccatgtgtctcctgaggttggattgcgagcattcagatatcatggaatgactgtttatccctcaaaccccacttttcccacgtgctgttctccaccagctatgtttgattaaccatgcacatggtggataattctacgtcagcacataggagcacccatcctttcttggggctgcggacattgcattcatcatgcagtcccttgtgggtgagcatgaagatcttttcagtctttcggtgctaaaaacaatgcatctctacctactttgtgcagcattaattgctcagagtcaagtgtacctatatctgtaggacacatccccagaagtgggatggctaggttggaactgatgcacgtacagtctgggtagatttgccaagcttcccacctcaggccatgccagcctgggctggcactacattcccaagaaggtccatttccccacagtctcaccaggctgcaggattcttcctgtcaggtaagaagcctgtcttggggcaattgttaagtttgcttttctgttayagagtyagtttgagcgtgttttcaaaagctgaagatcatttacacagcctttcctgcaaacactgtttttttcctttgcctgtttttcttatcagtttataggttccttgtatatgtgaaggaggttggttccttgtctgtgatgatttgcaaatrtttttrcatgcatcttttatttttgtttatgggcttttgccacatggaggctttgtgtttttctgtagttgagtagtctttttgtggcttctggtttggaaagcacatagagacaccaggacttgatgattgtaacagtcaggggcagctacattccttggcctttcactgcggctcacggtctggtatgggccccctgtacgtcctctccccattgtacagaggagaaaactgaggctyagtcayttgcccagagcacaccgccaaagtcacagatagtctctgccactcccctgcctccaccaccgtgggggaatttggcacctgctccctagtgggctctcctccccaggatatgcagtcagatgaaatgtggccaagtcaggattcgtgctgggcccactcccacctgctgcctgcacacctacaggctcagcattcagcaccccattaaagcccagtgggggctctgttcaaacactgcctgagtcctgcagtatggcgtcgtggcagagcatggacagatggccttgcctggtcccggctccaccgcttccaagtccatcacacaggggtccctggaggtttggggtaaggattgagtgtcccagtgcatgtggagcacagagatcagagcttgcacaagagaagcacacacaggtgtctgtgttcttggctgcagcccgcrtgggccaaggagttcagatccagtgccccccacctcccctttcctgccgccatgctctgtaggcttggcccctcctgctgtgatcctgatcacagccttccaccctagagaattaatcacagatccaggccaaggttctcccacaaaaacaagcatcatgtcggttacaagagcaagaaactggcctcaacttggcgagcttcaacgggggtccagcagcggcccagagcagcttccaggagtacgtggggggagtgcgtggtgctctgccttgttctgcggctgtctgaacagtctcstgcctctgcactcagttcagcctccaaacactgagtgcccactctgcacaagatactttgttgaggcagtgagataacacaggacccacytcctgcctctaagtctaatgrgggagcaggaggagggcaaggacctgggcaggatgaggcagagagatgaatggaatggagccgcatctcaggcagttgcaattcctgcaggccaggggagagaccaggaggaaagggcaggttatgccagaatcagggccaggtgtggaggtgtgccccaagtgatcctcccacctctcaagcctcaggagacaggaggatggcttgagccctagaggttgaggctgcagtgagctatgttcatgacactgcactccagccttggcaacagagtgagaccctgtcttcaaaaaacaaaaacaagccccagaatcagtgggtagaagactcggggcaggggagaagaccacccacctgctgctccttcagctggaaragctggactgccccaggctgggaggaactctgtaaggactcactagaagcttctgaagtgatcaggccactggaggacaagttgagggctgggtcacaaaagtgagtycaggagggcagtgagagtcactcaaggtcacaggtcacgctggcacgcctggcaggcagcctgggagagataggagtcccggctctgcaggtggagacatcgcagagggccttgggcatccaggaggatggcagtgccataggcgacgctgctgcggcctggccgtgtggagcactgcactcctaggaagcaggaaatggctgttcacaggaacccacaggccaccggctccagctttgacctgggaagctgtttcaggcaggtggagaggatgaggtttgaggagcagagggaagagctgctgagggggtgggcgctgggcagtcgggaggcgaaggcaggagatggcttgagccctagaggtcgaggctgcagtgagctatgttcatgacactgcactccagccttggcaacaaagcaagaccctgtctccaaaaaaaaaaaaaaaaaaaaaaaaaaacaaaacaaaaaacagaatcaagaatcagtgactaggagactcagggggaatgrgacaagaccccttagcctggggatatgttagtcccggaccagactgagcctggccagtgtgtgacggaggtgggagccactggaggggaggaggacccaggttcagggccagggttagaggggcgagcccggggagccggcgcagcctgtccagcacagggggtgcagaatggcaggagaggggatcacaggctgcaggggagcagcacagcccctgtgccctcctgccctttggctccaccctgtcccacagccatccctggtggtggggaggggcttcaggtaggaaggttctaagcttagcctgcatggccccctgtgggggagagccacctccagagggcatgggaagcagattgcygttcattctccatcacctgcccacattcctgcctctgggacattgaggggctggagtgggctggggtgtgtgggagacagaagcagagaaaggctcctcattctccctggagcctcccacgctcacagcccctccccagggaacgcctctgaggcacaggggaggaggcgctgcttcctctgcagctcctcgccgtctgcaggcgccttcacgcgtgtgtgtgggcacatgtatgtgtgaacattcgtgcgtactctgtgttcrtccacctgcctctccccgtgccctttctcctgccctcttcttggctgtctcctgctcttccctccttcctggtcctccttgcctttcccttgccctgctcagaccccggaggtggcagatcttagacccagagagagccttgaggtccctgttcctgcccccttcatggcttgattctccacctcagctgggacaggagcacccagcctaccaggcactggtccagttcccacacaggctcatggctgcagtgcccaggaaggccgggactcctgcaaacccatgtcattcccaccacaatgccctctgcaggggagccacataaagaggcctggtccttggtgcaggcatctggagagggctgcctcccccaggcctcccgcagtgcatgtccgtctgctctggggagggaattggctgatatcccaatctgtctaggggacaccatcacctggggcatcagakttctcatgcccagctggtgctgtgcctggggactagaagggctggtgctgcgtggggtcaagaggtttacctgataaaccggtaagggatgccctcttcccccagtagacttgggaggtgcctcactcccagggtgcctccgtcactctgtcagggatgctgttgtgcaggcttcagtcagcaggctctcatcggggcagcctctcctttgggcagaggctgataggaccaaagaggtttctagaggacttgtggstggaccaagcctctgtcctgtccctggaggaacccaggcctggggtgttgtggtccccagctgagtggagactgtgcctgtgctgagcttgggtagaggaggacaagaactaggccaggcgcggtggctcacacctgtaatcccagcactttgggaagccgaggagggtggatcatgaggtcaggagatcgagaccagtctggccaactttgagaaaccctgtctccattaaaaacacaaaaaaattagctgggcatggtggcacgcccctgtagtcacagctactcaggaggctgaggcaggagaatcacttgaacccaggaggcagaggttgtagtgagccaagatcgtgccacttcactccagccaggtgacagagcgagactctgtctcaaaaaaaaaaaaaaaaaagaactgggcgggcacaggctgccgtcagggcctcgctcaggcttccctgctgtgtgaccactcacgtcacatgctccatcttggcccagcagctttcagggcagagacggtgtccccgagctagagacagggaagcagaaggatctgctgtctgtgtcgggctcgcaagcctcgtgagtgcctccctgacccagaatgctgcccaggggcgcaggcaccgctaggcggcctcaggtggtccgttcatttcaccattcctgcaactaaaggacttgtgggttgtgtataatttctcactgtttttgatgagcctcgtttgggtgcatctctgagcctcctggctttgttccagtgctgcggctttgaatgctgctgtcttagaagcagctgtgcctctgctcaggtagcagcagggggcttcacgccccatccccccggccctgcccccaactctggctgtgtttctgcaggatgagaaggcgcgcattgaagcattgggtggctttgtgtctcacatggactgctggagagtcaacgggaccctggccgtctccagagccatcggtgagagccaaagaggccgacccaagtgggagaaggtctctcggaagcccaggcctcgagtgtggcccgcggctcaccaggggttcagggaggcagtgtgatgggccragggggatttgtcatgcactggggtgataccctcgtagtgtgaagggaacagggcagattcagagactgcagcaccagtgtctgagtgtaagttacactgtatgttattatctcacctaaaacagctcctacaaatctcatagaaacctgtggctcaccaccctatgggctggaagtagagcttccaatattccggaaatgaggtttatcctcctcccgcgttcatgctgacaatccttttttctcttttgggaaaaaagtgggttcgctgggcgcggtggytcacgcctgtaatcccagcactttgggaggccgaggtgggtggatcacctgaggtcgggagttcgagaccagcctgatgaaaccccatgtctactaaaaaaaaaatacaaaaaattagccaggcatggtagtgagcccctgtaattccagctattcagaaggctgaggcaggagaatcacttgaacccagaaggcggaggttgcagtgagctgagatcgcgccactccactccagcctggataacgaggaaaactctgtctcaaaaaataataataaaaataaataaaaattttaaaaagtaatgggtctggctgggcatgctggctcacgcctgtaatcccagcactttgggaggccaaggtgggcggatcacctgagatcgggagttcgagaccagcctggccaacatggtgaaaccccttctctacaaaaaatacaaagttagccaggtgtggtggcacgcgcctgtaatctcagttacttgggaggctgagggaggagaagtgcttgaacccagaggcggaggttacagtaagcggagatcgtgccactgcactccagcctgggcaacagagccagactgtgtctcaaaaaaaaaaaaaaaagtagctgggcgcggtggctcacgcctgtaatcccagcactttgggaggccaaggcgggtggatcacctgaggtcaggagttcgagaccagcctgaccaacatggtgaaaccccatctctactaaaaatacaaaaaacattagccgggcgtggtggtgcctgcctgtaatcgcagctrcttgggatgctgaggcagcaggatcacctgaaccctggaggtggaggttgcggtgagccaagattgcaccattgcactgcagcctgggcgacaagagcgaaactccatctcaaaaaaaaaaaaaaaaagtgggtccagcctgcatctcattgtctcagcatgcggtcagtgccgggtctyaggctgtgggcactgtgaccacacctccttcctggtacttagaaaatctctccctccccagctgattgccagggatttggcacctacccctctgaaacattctgtcctttttggcagatgtggcaccttcttgacagcccatcctcaggctgtgtctttccttgtgtctctggacactccaggaagtgaggccaggatgggacggctagggcagagaaagagggagctcggcctggtgtggtggctcatgcctgtaatcccagcactttgggaggctgaggtgggcagatcacaaggtcaagagatcgagaccatcttggccaacatggtgaaaccccatctctactaaaatacaaaaaaaaaaaaaaacaattagctgggcatggtggcgcgagcctgtaatcccagctactcgggaggctgaggcaggggaatcgcttgaacccaggaggcagaggttgcagtgagctgagatcgcgccactgcagcctggcgacagagcaagactccatctcaaaaaagaaaaaagaaaaaaagggggagctcacaggccaaggtcaggggtttccgttcccaggcaagtgggaagtactgggcagtttgcataagggagcaacagaccccagaccccatgagagcaggttggtctctgtccctgcaggatgtgaggtctaggcctgggtaggtggggaggaagctgtggacaccgtggtcctctgacccgggctcttctccgcctgtccaggggatgtcttccagaagccctacgtgtctggggaggccgatgcagcttcccgggcgctgacgggctccgaggactacctgctgcttgcctgtgatggcttctttgacgtcgtaccccaccaggaagttgttggcctggtccagagccacctgaccaggcagcagggcagygggctccgtgtcgccgaggagctggtggctgcggcccgggagcggggctcccacgacaacatcacggtcatggtggtcttcctcagggacccccaagagctgcbggagggcgggaaccagggagaaggggacccccaggcagaagggaggaggcaggacttgccctccagccttccagaacctgagacccaggctccaccaagaagctaggtggtttccaggcccctgccctccccttcctcccatccttgtccttctctccctcagaagcctcaggacccaacaggtggcaggcagtggacagggtgcccgccccacagtgctttccccagcaccccagagccagtcgggacaccccccgcagcccrtcctggtggctgtggaactgcactgggtggcgggcagatggtggaaggcagcttaggagacctcaccaaagagaagatggaccggctcttgctcccagctcctattaggcccggggtgggaccagaggtcataggtgcccaacggcagccaaaccaaagacactggtgtgcatggggcagcatggttgtgcacgtgggaccctggggcggacccaggagccaaactcttgaagcaccccctgggtcaggcccagcagcggagtggccagccccagtttcccattgctcctctctgcggccagggccaggtgggttcatatttacagatatgcccagccagtcctggtcggccacaccagtgtcccaaagaggagagcgcagcagagccaggggtctgttctgtagcagccacccccctgcccccactccagggcagccatgatgtgcttgggcccaccagggccttccgggctgctctcttccctgagcccggaaccggcgacgcacatgtgtcttttgttggtgtgtttgtttttttccagggaggtctaattccgaagcagtattccaggttttctctttgttttatcagtgccaagatgacctgttgtgtcatataatttaagcagagcttagcatttattttattctttagaaaacttaagtatttacttttttaaagctatttttcaaggaacctttttttgcagtattattgaatttattttctaaatcaggattgaaacaggaacttttccaggtggtgttaataagccattcaagtgccttacacagctttgaagaaactaggactgcagtgggctcggataggcccattgaggtttttagaaaagcaggatttgttttgttagggaggcatgattttggtgagatctttctggaagagttttccgcctctttgtgatgctgaacacccccaaggttctcccctccccccgctgcccaggtgactggcaggagctgcgactgccacgtagtggtgcctgggcccgacagcggggctctgggcatcccgggtgaccttggcccatctgcctgcattcccacccccttgggcctggctggatcccaggcagagggaccttgctgctgtgtgattggaacattcccaaatatcttgtgaatttgtaatcaaattggtctcattgggaaagactcttaattaagaggctcaggcaagcacagaggcagcccgtgggtctctgtctcagtctggaggcagcagggatgctgctgggagtccatggcacaggccacagcccctcaccttgccgcggtggctggcagcacgcctgccttgctctgccccatgccctgaacaggcatgagagctccacgtcccctagtgcaccctgagagggggctcacaagtgaccgatcctgggtgcctcagggagctcactgagggcgtgcaaagttgaaagtggcaaggctgggggagggtgtcgggtagagggaagagggcagggggctaggggaggactcagaggccatctgcagggccaagccacaggaagggctgagctggaggtgggcagggctgctccaggcaggtcagagcagtgcagggggaggagaggagaaagggaggaagctgggctgtgtggtccccatgaaggcattcagagtccacctgcagacagcgagagccccaggaaggtttgcacagctgtgccccaagcaccttggcctcctctcagctcgccgaggaggcacgctagagccgccttcccggtgggagccctctgtcccacagggagcggggagccagctttgctggggccctacctgcatgcccagccttacccctcattctcacagcacagatgaggttgagaccatgcagtcaatgcattgcttaaggtctcttatttacaaaaaaaaaccttaaacatagtcgctgtcattcagacattcagagaatggttggccacaaacaatgaccaagtattgcttggcttaacttgaaggcctgctgtctccttctgggggtcagggacgcagctccaccctcaccactagcccaccctgcccgtgggcataaccttgacgaagagagagaatgattggcatctgcttttctcttttctttgctaataattctgttcctggctgccgagagtgaagtttcaccatgtggaggtttggctcctatcacctggtggtctgattcataccctagcctgaggytccactggaagatctcgcagcctcagtgtatgggaaaccctttccccaggcttgtcccagcactgccgctccccacccctgagccaggaycccagaggatggccatgccccgtgcctggcagaggtctggtgccagcactgggagctgctccgcccttgccttggggccgagggagccctcgtccacccctgcacagcagctgggcacagaggagcgctcttccatcttgaccaggactgcaccaagaagcaccaggtgtcttcagcctccaacctccggggcgaccttctcttccagccacagtcccatgagggcccctagccagggacactggtctgtaaattgtaatcctttctccagcccagctctccacttgttccttgtgtgagctgagcaggcagtgcacctctgagtgtcccttttgtaaggcccaggggttgcactgagtctgcagaggccgcgacctcctagaacgctgtgggtgcaggtgasccggcgtgtcctggggagatgctgccagcacacaggggccctcctgctgccagcaggttggggtggttaagtcttattagtgtctattcttaaaattaagtgggctggagaagaatggagctccacatgccagcaccgtatatggaatacaaaagctggggaagcagggcctgccttacaggtgtggctgactctgagcccaggcctgcaggggtggagggcagtccctcagaatcccagaggcagtcccagcctcagaacccaggataggaaatgggtgtgtttagtggggaaagggacggggtgcagacggcagggccagtatggggccccctccctctcctctcctctcctatggtgagcccagcgtgggcaccgggccgtctcagccrtgttcccagggctgggaggacagctctggcccttcttaggcctagcctcgtcccaagctaaatgtaagccagttgggctgtgttaaaggaagcagtgtttttggttcgattctgcctctgtagctcaaggggggcagcccccagagtcctgtgcattctgccaaggctccatagctttgccaaatgcacggagctctgccattccggtgcagtgcaggccttgcgaagggtttatctgcgttcgtctcggtgggcttctcctgcatgggagttgtgttcctgtgcaagggggagctttgctccaggacaggatgactgtcttccctattcttagggacaagtcccaagatgccagaaaggcagtctcccaaggacccmccatgcagaagtgtcaataaaccmcaagttytgaactctgtcgcccgagtcctgccttcttcctgacttctgagcatcttgtcccctttgatgtccagatgtgtttggaagctgctttaatattggggaccatctgcaaatcttgcgaagcgagcagacaaattctggagagagccctggtggcctacaccctcctggtctagccagcaacctgattttcctccctgaggggctctgagcccacccccaccagcagcaggaaggtgacaggaaagggattaagcccctgggacctcacatgacattggggagccacaggagcattgaggacccctcattttatccaggagcctgatgtgccccaggaggttccatcctgaggatggagaccctctgacatgacgctcttgaggcccaccatttataccctcctggcacctcctgaggccaggtgtggtggcgcacacctgtaatcccagcactttgggaggctgaggtgggaggatctcttgcgctcaggagtttgagaccagcctgggcaacatagggagacccccatctctacagataatcaaaaaattagccccagtgtgatggcacaagcctgtagtcccagctacttaggaggctgaggcaggaggatcgcttaagtttgaggagcttgaggctgcagtgagctaggattgcgccactgcactccatcctgggtgacagagcaagaccttgtctcaaaaaaagaacaaagcactgagcctttcttctgccccctgctcccgccaccccgctccgccatcctcgaagcctgcatggcacttgtcccacatgggagctcggctgccgcccagaagtgaatccactgcaggttcactgctggtgctccctgaggggcagggttatagggggttttttcctcccccctttaggttttcttctaaatcctaattttttttagtacggtgaacatgctttaaaaatgcttttatgtaatctgtcatgggaattttaagggaaaaaaaagataaaaatgccttaacagaagacctggagagatccaccagcagcaggggtgggcagtgctaagccctggggtcctggtagagaactaggaatggcagtggtggctgcactaggtgggggagcgaggctgagggggtggggagcagcgcttcggtggtgggcaagcctcactgttcctggtggaagggactggcccctgatggctgcttggacagatatcagaaactcacctcaggaccaccacacctgatggattttagggaaccccccacaaggcccgcccacctgcctccctttgctctagacctgtggcccccaaccacaacctccagtccagacctctgtagcctcacccacccaaggacggccagcagcaaaatgcagggccttggcccgagcgttgctgctggtcgcttagcaggctggagggctggttccccctgaagccccaggatagcacgcacaggcccagtcccatgtggctgcagctcctagcacacatgaaactgctcttggagacggcttcagagccttctcagtgccctcagggggtcagtattgaagcagccagtcgtgggactctgtcgaccagtccttcagcgcatgttggccaagtgtttgccacgctgctgcaggtgctggggcaagggatgagccagctaccaattccccacctaagacaaagaggattcggcttatcacacaggggtcaagtgcccctaggccgcaaagctgctaaggggtccaagccttggaaagtcacccttctcagagtccccaattcttcactgccttttgatctttggttcctttctcaatcaagagaaagcaaggcagcaggggccgggaaactcgcccttgtgctcctggctgagctcaggcttcaagggcacacaaacatcagaaatgcctccccgcagacactgcccagccacggccaaaagtgctgccctgaacttctccgtagaatgtgggggaggccctcaggcttgtgggcgcatgggagcagctgtcctagggctgcctgagcccggtgccttccccactcccactttgcctgcaggcctcctctctcctgtctgtagccttgtctgtgcattttctcctggtccttcccaagccacctgagagagctctcagtcccctcccccggctcccggcagtgcctgctgcccagggctgcagcctccaactctccaggaccagcgccagaaaagcagctttttttttttttttgagagaagtcttgttctgtctccaggctggagtgcagtggtgcgatcttggctcactacaacctccacctcctgggttcaagcgattcccctgccttagccttctgagtagctgggactacgggtgcacaccaccacgcccagctaatttttgtgtagagatagggtttcaccatgttggccaggatggtcttgatttcttgaccttgtgatccacccgcctcagcctcccaaagtactgggattacaggcgtgagcaaccgcgcctagccaaaagacagctttatctgtgtccactgtgtcacagagggggcatccttagggaagcaggggaactagccccggatgcaagagctgggaccaggccctgggccgcccaccacacctactcaagcatccatgtcctcctccccacacccctgctcctctgaagctcccagcaggatttccttcctaagtatctgctgtcttgactgttctctggtgaactggcttatgtgtctgaaactcatcttcacagccagatagtggctcagtgctctctgtctgcccctcactttcacagagctgatcccggagagcaccctctctcaggacctctgggtgggggggggggaggcccaagggactgagggtgcacaggcaggcagacgggctggagctgcctggcacctacagggggttcacccatgggagcaggccacagtgtggcaagtgggggtggggrtggaggtgaaaggggtgtgagccaacccctcagtcaggagggggccaaacctggagctaagtctagcacagacagctgaggccagagtctgcctggggaaggggtggggagctggggggttaggactgggcctcacacccaccaaatggaggcttcagctggtggaagggagcccaaaaccaaggtcccccaggcaagaggtgacgtgaggcagagccagggaaacagaggcaagaatcctggctgggagggctgatgactggcctgccccagatttccctcagaaggtccctggatcccagctgcgttgtggtcctgcagatccctcctgttctcacctggtcttgagaacaggtggctggtcttgggtggagccaggctctgaaccagttgaggacaggacctcagctggggggctccatacacaaagctgtcttggatctgcttcctgggacttggacatcggtgttctggacatctgggcctcccacagccaagaagtgggcacaagccctcgagagccagccctgaggatttgtcctacccccatagagggtcctggccagatgtgttagctccaggagcagcacagggagccatggtggcaccaaagccccatcacaggcaggcctctccttggaccactgtcctaggcagtcactgtggccatagtcaggggacctcttcctcactcactgcccagccccaggaggctcaaaggcctgcctctggggcccactccctccctgccatctcaatgcctgatcccaacaatgtagcagacttttctgaacagcttatcatggtctgttttctttcagtaagtgaaagatttttgcaccaagaaaagtttgtaggcagacatttagaaaaaaatagtggaagtttcttacaccgtatgtgtctataaggacacagatatcaagccctgacaatcctatatgagcagttcatcaggtgctgttttatttcagtaaatggaagacaaaaatcttcttccttttttttttctttttttttttttttgagagagagagtctcgctctgtcacccaggctggagtgcagtggcgcggtctcagctcactgcaacctctgcctccgaggttcaagcgattctctcgcctcagcctcccaagtagctgggactacaggcgtggagcaccatgcctggctaattttttgtactttagtagagatggggtttcaccatgttgcttaagctggtctcaaactcactcctgagctcaggcagtctgcccacctcggcctccaaacgtgctgggattacaggcgtgagccaccacgcctggctttcttccatttttaaaacacaaagcctttgacatcaacaccttgagaattgatgtccagatcagctccaaagcctaacagtgaaacagacccaccagccaacatcaaaacaactttgcccataataagaagatccttctagacttcaccctcggccgcccccaccactcaccctctaaccagtatcctaaatgttagaatcatcctcatagatttaccactatgtctatatccctacacactgctgtatagttttgcttatcttttaactttctgaaaatgacattttactgtctgctttcttatacttcatgtttgtgtcacttagcatatgtttctcgaattcatccatgctgtgtgggtttctggatctttgcagaaacagagctgccataaacattcttgtcgggtctcctggtttccatgcacaggagtttctctagggtatacaccaagaagtgaaaatgctgggcagagcaggctatgcaatttgtaaattaaaattaaattaattgcattaaaatttaattaaattttacatttttattctaatttttccttttttttgttgttcgtttttttgtttgtttgttttttcgagatggtgtctcactctgtctcctaggctggagtgcaatggcacgttctcagtttactgcaacctctgcctcctggattcaagagatcctcttgcctcagcctcccaagtagctgggattacaggcgcctgccaccatgccccactaatttttgtgtttttagtagagacggcattttaccatgttggccaggctggtctcaaactcctgacctcaagtgatccatctgcctcagcctcccaaagtgctgggattataggcatgagccactgcacctggtcttttgtttgttttttgttttacaagtgggatctcactctcttgcccaggttggagtccagttggctcgctggagcctcgacctcctgggttcaatctggcctcccacctaagccacccaagtaactgggactacaggtgcacaccactatgcatggctaatttttttacttttttgtagagatgaggtttcaccatgttgcccaaggtagtcttgaactcctggcctcaagtgatccgcctgcctcagcctcccaaagtgttgggattacaggcatgagagccactgcacctgacctaaacattttttaaatttatttatttatttattttgagacatagtcttgctgtctcacccaggctagagtgcaatggcgccatctcagctacgtctcccaggttcaagcgattctcctgcttcagcctcccgagtagctgggattacaggcgcccgccaccacaccctgataattttttgtatttttagtagagacggggtttcactatgttggccaggctggtcttgaactcctgacctcatgatctgcctgcccaggcctcccaaagtgctgggattgcaggcatgagccaccacaactggcccacccaggccaattttaacaattttaaatttaaatgtttagggctgggcgcagtggctcacgcctgtaatcccagcactttgggaggccgaggtgggcagatcacgaggtcaggagtttgcgactagcctggccaacatggcaagaccccgtctctactaaaaatgcaaaaactagccaggcgaggtagtgggcacgtgcctgtaatcccagctactcgggaggctgaggcaggagaattgcttgaacccaggagatggar

SEQ ID NO: 95307 - DNA, 44801 bp, Homo sapiens
  misc_feature (1)...(44801): n = A,T,C or G
tccggggagtatgtgatgataatcacccccagcagattccattacctcagcagctcttgttcccccgccactggcagttctgcaatgccatagcattttccagagctaagatctctgggttgtatttgctgacagcctgcaagcttgcatgctctgaaagattttttttagtttttaatttttttgtagagatggggtctcgctttgttggcgcaatcctcccacctcagactcccaaagtgctggaattacagttgggagccactgtgcctggcctggaagactttcaacttgtgtctcagtgcagttcttgactcacctctctgggcctcaggttctacaaatgccagacacctagcgaagagctctgcaggctttccactgcctgtattggaaatcttgcaattcacataattattcagtcactgcctggtacctttatcttcccatcccactaatgttagtgttttttaatggagcttttattctgagaatatgtgtttgtctgtttgtttgttttttgagacagagtctcactttgtcacccaggctggagtgcagtggcacgatctcagctcactgcaagctctgcctctcaggttcaagtgattctcctgcctcagcctcctgagtagatgggactgtaggcacctgccactatgcctggctaatttttgtgtttttagtagagacagggtttcaccatattggccaggctggtctcgaactactgacctcgtgatctgcccgccttggcctatcaaagtgttgggattacaggcttgagccaccgcacccggccgagaatatgtgttgttatttatgactggattatgaagaatcaggagaatgcatttcatgtctgattctgctgctaattaagtcaatcatttaatttttgggacctcagtttctttgtaagtaaaataacacctgcttgttcttcatccctgggctgttgggaggaacagatgagacagtggctatagaagcacttggaaaatgcacttgtcctgttttgtaaaataaaaaggtattaaatgtgtatttctgccatgtacctaatgattattcagtgcgtatatatctgaaaagtcatgttgcaaatctttctgtgaaacagatgctattttaaattcactgggagaaatatcctatttaaagtaatctatagtaatttctttttatataataaaaatatatttgtaaagtcgacagacaacttgtaattagttttgtgtctggaagaatttgtttagagaaggcactctgtatccttgagatggggtagcaaagagctaggatcctggctcttactgttgactgttaatagctgcatgatcttgggcccagttagggagttactctgaggctctgtttcctcatctgtacaatgggaaaaagaaaacgtacgcatcttgtagggttgttgttggatgggtcctgcctggtgaaacatttggcagctccccagtaaggacagctttggcttgatgtgtgatgtagctgagctgggtcccagtccaggtggacagtgatctatacagacagccctgtcttcagctctggtgtctgtgaggattcaaggtgaatgtgcattttgtgccccaaatgggacctggcctgttgcgaacactttacaattataagcagggtgtttccagggctgtttgmgcaatagagggctgacaccaataggtttgtggttatccagacatacttacatttctagactaggatttcatatatttttggagaagtcagtaaatccccttgggacttggatgaaagctctagacctttgctacatacagacatacatacatatgcgttctgagtccatgaattccagaccttcatgggcaccatgatgtcttttcatggatcccccgtagggaagccctgaattatttttttttaggttaatagaggatttaaaaatctaaacagtacaaaggttccatggtgagaaggcaggctttttctcaatgggatcttagtctccagtttcttgttcccaaaggcaaccactgtcactaggttggagtatccttccagaggtgatggaaaacagaggtgatgctcaacttagtcatcagggaaatgcaaatcaagacctctatgagatgccacttcacattcactaggatagctataatcaaaaagacaaaaacaagtgttggccatgatgtggagaaattggagcccacacacactgttggtgggaattgaaaatggtgagcactttggaaaacagtttggcacttcctcaaaaggtaagaatttccatatgacctagcaattctacccctaggtatctacccaagagaaatgaaaacatgtccacacaaaagcctgcacaccaatgtttataacagccaaaaaataggaacaacctaaatatccatcaactgataagtggatacatgaaatgcggtctattcatgcaatggaatattcagccatagaaaagaattaagtacttgtgaaaagtaaagtagaggttcctcttcaaagactttcctccccatctaattaggaataaatagtaacttctcttagaagcaaaatttattcaaagacctaacattcttaaatacctgctagccataataaatcaatgtactttatgttcttaactcccacaatttagcctaaatatttgccctggcacggttatactggtgcaagcaagcattaagtcatagcctgttcctcttccttatttgaaagtgtttttacctttctcagcattccacaagttacttcctccttcctttgttctcctctgcttttgcctctgaaaaaattctaagttgttagccaatcaagacaaatacagaatgtgaagtcccgtttcagccaatggaaactggacccagaggtagggtggatacgtcagrttataaatgaccctgtctcctttgttgggtgtactcgtggcaaaactgctggcgagtgtaccctttctgcagaaagtgtaaaaatggccttgctgagaaaattatttatgttcaagtgctatttctttatggcactggggaacaagcatttcaaacatactgacacgttacaacatggatgaaccttgagatcatggtaagaaaaagcaagtcacatattgtatgattccatttttaattttttcagaataggcaaatctatcaagacaaactagattacagtcttgctgaaattacaggagtgagccaccaggccagctggtcatacacctgttttctttcttcttttttgttttgagacagagtctccctctgttgcctaggctggagtgcaatggcacgatattggctcattgcaacctctgccttccagattcaagcgattctactgcctcagcctcctgaatagctgggattacaggcacatgccaccatgccctactaatttttgtatttctttttagtagagatggggtttcaccatattgttgaggctggtcttgaactcctgaccttgtgatctgcccaccttggcctcccaaattgctgggattacaggcgtgagccaccatgcctgctgctcatacactttaaatgagtgaactttatggtatataaattatatcttaaagctgttagaaaggaacacacaaagtggttaccctcaggcatttgaaaaaagaaagccacatttacctttgtatgccactcctctctatttagccacacatgtgttttgttaatgcttttctaggtcctttgttttttcatgtctttcttggctattgctcctcaacagtaagtttagatcacttcattctttttgccttacattccattgtatggatattccttaatgtatataaccagctgatagagattgaggttttgttttcattctagctactacagacaatgccaccttccaaggagattgtatcaattaacacgttcatcagggatgtatgggagtgcatttcctcacatcctcagccacaaggtatattatcctgctttttttttttttttgagatggagtcttgctctgttgcccaggctggagtgcagtagcgtgatcttggttcactgcaagctctgcctcccgggttcacaccattctcctgcctcagcctcctgagtagctgggactacaggcatctgccaccaggcccggctaatttttgtttttttttttgtatttttagtagagatggggtttcaccatgttagccaggatggtctcgatctcctgacctcgtgatccacccacctcggcctcccaaggtgcggggattacaggcgtgagccaccgcacccggccccttaccttgttttttgattattgccaatctaacgagtggaaaattataattttatatgtactttttaatttaatttaattaattaattttttttttttagagacggagtctctcacccaggctgaagtgcagtggcgcaatcttggctcactgcaagctccacctcctgggttcacgccattctcctgcctcagcctcccgagtagctgggactacaggcgcctgccaccacgcctggctaatttttgtatttttagtagaggcggggtttcaccgtattagccaggatggtctcgatctcctgacctcgtgatctgcccgccttggcctcccaaagtgctgggatcacaggcgtgagccaccacacctggccttacatgtacttttttaatggttgaggtggagccatctttcttatatttaggagcgtttcatgatttgtttttgttcattgcttcctttgcctttttttttttttttccctgagacaggggtctcactttgtctccctggctggagtgcagtggcagtaatcttggctcactggaccctcgacttcccaggctcaagggatcctcccacctcagcctcctgagtagctgggactacaggcgcccaccaccacaccaggctaatttttgtgtttcactagagacaggatttcaccatgttgcccacgctggtctcgaactctttgcctcaagagatccacccacctcggcctcccaaagtgctgggattacagacgtgtgccactggacccagcctcctttgccagtcttaatactaagttattttattattttgggagaattgctacatcgaatatcagccctttgtcatatgtttcgagtatttttctgaatttgtaccttgtctttgattttttttcttttttgagacagggtcttgctctgtcctccaggctggagtgcagtggcgggatcacagctcactgcagcctcgacctcccggcctcaagtgatcctcccacctcagcctgagtagctggcatcacgcccagctaattttattttttgtagagatgggggtcgcaccatgctggccaggctggtctctaactcccgagctcaagccatcctcccgcctcggtcttccaaagtgctgagattgcaggcgtgagacaccgtgcccagccgtctttaatatttttcaccaggcggatagttcacatttttgtgtagtcttttttttttttttttggtgccttctaattctaattcttcccatttctgggtgtgtacttagtctctctgagccacagttttctgctctataaagtggggtgataatgctcagtacacggtttgctttggctcgatgagaaatccaggtctgaaagcttcaggtacagcggccggcgctgaggaaaacagcgttaagtgaggcgcgtcagcggacaccacctgcctgcacatctggctggcctcaacttcccgctgttcgagcccacgtgagtggctccgccccatctggcttctgaccaatggacgagcttcctaaggcgtaccgtcccgactccaaggcgcctggctttgaggcgggctgcgtcttgctcggagtcccgccccttgccgggtcgagcaatgggcgccttccgtttggcgcaggccccgcccctgtcgctctccggcctgcgggccgcagggctcgttccggagggcgggcgccacggaggccggagtggtcgcagttcgggcggaggccgggccaggcggggctgtagggctggggcaggcggcgggctgcccggcgggacagctgcggcagccggcggggggcgtcctgagttggcggtcgagggcgctgccagctcccgaggggccgctcgggccccttccggcccgggtctggttgggcckcaggagcagggcgggctgcggcgcccgggtctggccctggcctacgggctaagcgcccggccccggggccgcggatccggcagccatgtgtggatcttgaagcgccatgtggtcttctgaagcgctttgacagttctaaagggctttatattgcaaactgatcaaagcgcttcgtagccccggaagcgcttaggcatctccgaagtagcgctgggcaaagtgaaggcttcctgatctcagaagcacgttgtgggcttggaaacckacggcagcctttagtcaattttggatcgctttgacttctccaacacggtttggcatctctgaaaccttgagaactgtgatgggcagtggaaagaagagggaaaggtcagtgaggctagcccctggctctgcccttatgtcttgccgtcctcctgggcccggggtggcgggaatctgaggtggggycgccagraagggtggtgtkggaatccaggccccctgtaccttgcaggtgcccatggcgtccgagcggggcaaggtcaagcacaactggagcagcacgtcggaagggtgtccccgcaagcgcagctgcctccgggagccctgtgatgtggccccctccagccggccagctcagaggtctgcgtcgcgttctggagggcccagcagccccaagcgcctgaaagcccagaaggaggacgatgtggcttgctcgcggaggttatcctggggctcatcccgccgcagaaataactcctcctcctccttctccccacatttcttgggccctggtgtgggcggggccgcctccaaaggctgcctgattcggaacactcgggggttcctgtcttcagrgggatcccctctgcgtcctgccaacgcctctttggaagaaatggcttctctagaggaggaagcctgcagccttaaggtaggtggctgccacgctttgcaatcggtgaagccccttccacatggcttgagaggttggggatgggaattttggtggaaggagactacaaaacattacatccttgaaggtctggaaggtctttctagaagtccactccccccaaactcgaagacctagcagtcttccaggcgcgtggcctgaagttaagtagagaggtaattttcaaactcggcagcactttggaactacttggaaagctttaaaatacttgggcctgcctcctactccagagaaactgatttattgggctgaggtgtggtctgggcttccagatttttcagtgctccccaggttattgtaaacgtgcagcccygttggagaatcactgcagtagaaggtggattatgtgctcaagagaagaatgtatttattttagttgtcagtttaaagaattgtgtgcccttgtactttgaaccactctgaatcacagaaccaagaattgcgsttcttggtgtagcttttctccaaagtcatagtttccagcatgttggggttttgcttggtggtgctagttttttttttttttcttttttttttggaggttaaattgttaattccctaatggaaacatgcaagagggtttcataagtactttgagcagaccaaggagtgcttcacagagaagatacatttcgctcatctactcaatcaaggctttgaacaaatatgtgttgagggtttagtttgtgccaggcaatgttctaggtgtttgggattctttactaacaaaacagatcactttccccttagagtttgcatcctagattttgaagstctgagtcttaagaagtgagaagttytgcctgtggaggagtggagaaacagtcttatttgggatcagatgggctgcctctagagaaaattactttacaaaagcaattaaaacaggccctaaggaatatgtgtttgtttttaagcctagccttggtggtttcttttgtgtagctgagaaaggaggctgtatttgactgtttgtcttggggactcataggctaagtgcccctggttttttcaatgtggacctcactgtctgaactcttgtgtgggcacgtggattttttctttttaaattcacaaataacagtgagttgaaaagccctgtctctagcgtaggaatgctgaatttgtctcaaatcaggtaagtatgggactttgctcatacaagttaatcttgccattaatccttgatacaatttcagtagacttgggtacagcataaaataataccagttgattcaatttagcttcactgacaatttgtagatagagtgaaacctgttactgggagaggcaggaaatttaytttacatagtctttcaggtgtgctgaatccctggctgtcctaaagacctggaactcaggtttgagggtgtggtctctaatctgggtgggtctaattgtaggtggacccacctttctctcattaaggctaaaggggccttgttttgcaagaacccaatttaatggtttcagtagaagcacttgagggttattgtgggccacgcactgttgggtctgggagtgatgagcttctagggagcagtctggtgggagggctggaggagtggtcgcatgactgcccacaatgtggtatgatggagtagtgagcccagaatggaggctggagagcgaggtagggggtggattgcagcaaggttttagtagccaagggaatttggattttatcctaaggacaatggattttattctaagggacaattcccttagaattgtattctctttttttgagacagattcttactgtgtcacccaaggtagactgcagtggcatgatctctgctcactgcagcctccacctcctgggttcaaacaattctcctgcctcagcctcccaagtagctaggactacaggtgtgcgctaccgtgcccagctgatctttgtatttttagtggagatggggtttcgccttgttggccaggctggtctctaactcctgactgcaagtgatctgmccgcctcagcctcccaaagtgctgggattacaggtgtgagccaccatgcccggccaattgtattcttattttaaaaaaattattttatttttttgaaacgatttcccaggctgragtgcagtggcgcaatcatgtctcactgtagcctcaaactcctggggtcaagcaatcttcttaaataggtgagaatatgggcatgtgccaccacaccctgcagattaaaaattttttttttgggctgggcgtggtggctcacgcctgtaatcccagcactttgggaggccgaggtgggcagatcacgaggtcaggagattgagactaccctggctaacacggtgaaaccctttctctactaaaaatacaaaaagttagccgggcatggtggcgggtgcctgtagtcccagccacttgggaggctgaggcaggagaatggcatgaacccaggaggcagagcttgcagtgaaccgagatcaaggcactgcactccagcctgggcaacagagtgagactcagtctcaaaaaaaaaaaaaaaaaaaaatttttttttttgtagagatgaagatctcactgtgttgcccaggctggtctcaaactcctgggctcaagctgtcctcttgccttgtcctcccaaagcgctgggattagaggcatgagccactgtgccagctggattgtcttctaagcaattagagaatttatacagggctctacacagaaaaggaaattgcattgtagaaagatcactcttgtcgagtgagggtttttatattaccctgattgtccatctctaggactgctgaagtctcttcctggagtatatgtttgtcagtttaaaaaccaagtgtacagtacttgactcatcttgatgaattacaaaacacctcttaccttccaccttcatctgtacctcttcctcccttgctctgtggtcatctgtgaacttatctgtcctggtcctaagtccttcagcaagcacagccgaggggtactcacaaaaatggcatgttcatcctcaggtccttctagagtcctctcactgctctcctgtgtctgctctgtaaactttttttttttgtttgagacagggtcttgctctgtcacccaggctggagtgcactggcatgatcatagctcactgcatctcaacctcctgggctcaagcgatcctcctgcctcagcctcccaagtaggtggaactcaggcgtgtgccaacctgcctggctaatttttttttttttttttttgagacagaatcttgctctgtcacccaggctggagtgcagtggtgcaatctcggctcactgcaagctccgcctcccgggttcacgccattctccttcctcagcctccccagcagctgggactacaggtgcacgccaccatgtccggctaatttttttgtatttttagtagagatggggtttcaccatgttagccaggatggtctcgatctcttgacctcgtgatccgcctgcataggcctcccaaagtgctgggattacaggcgtgaaccaccgcgcctggcctgcctggctaattttttgtgttttgtaaagacaagagtctccctatgttgaccaggctggtctcaatctcctggggtcaggcagtcctcccaccttggcctcccaaagtgctgggatcacaggcatgagctactgtgcctggccttgctctgtaaactttgagggttacacagttgactttgttcccttctcccaccagcctttaacacatctttctctgtgccaggtcacagaatattctgaggggaaggtgttagactggtcattttagaatcggtagagatccctgctggctgacctcacatcgttcccttcttacctccaggacagttggagatgtttcatgttagctgatgatcttcatttactcttcacagaggagactaactgtgtgacgagcaccttcatgtagtaaagattatttttactatgacatctaaatgtctacattcaatttagagttgaaagaatggaagggaaaatttgagcatgtatgataaggcttggtcaactatgattctcgatgtttgatctatagactatcacataatcccaaaagtgtcgtgaagtaggtggtattatctccacatatccattagtaaataccttcatatcaattaacaaatatttaagcacctactctgtgtaggcactgggcagatgagattcagaaaggttaaataagctgaccaaggccatgcagctggtaaatggccgagctgtggggtaatatcagattagtccaacttcaaagccagtgttctytgcactgctgcctctgggagcacctgctctgttctagcctggcatcagatgtaggggtggcaagacgaaggtgccarggtccctcccttgcggagctctctgcagggtgagttagcccaggcacagtaaagcactgggtattgaggctcttgagtgatagagcttttgcacatcccctttcctgcatctccacttggcacatgtctagtgcacacgtggaacrccaggcttggggctgttgktgccaaggacaatcgggccatgcttcacagactgaraagtcactcaccacggggcagtgagtggagagctgtaacagggatgggtttggagtacccaagggtcaggggaatgagcgactgaccatcaggaaggtcctcacagaagaggtgacatctgagtcttactgatggacaaggagggggacaggacatttcgggcatagggagcaatacatgcccaaaatgtcaggaaatgctgcttgtctggagtgcttggggcactgctggccctcccttctctcatccrtgctctcctgcgttccctggacacttgcrtgtttggaggaaggcaggagatgaggctagacaggaaggctggggccagtctgtgaagggttcctgatgagctcaggggtagggattattctgtaggcaaatgtggagccctggaagggttctaaactaaggckgaagtggtggggtttgcattttagagctcctctggcacgctgcagagaargggtaggagggagaagacagggagctggtgaggagctgttgaaatccttcaggctactggtgatagggctggagcaacatctccacttatctttccttctttcctttggagatgcacagttcaccaagcagtgcttccaggaagaacgaactctcccctttatgaagtcaggtggtttgtctcttaccttctgcccatggtctacctacttcttacctttagagccaactgtcacctgctgaaactcatcctcggtgtcgttgatccatcttaggtcctccagcctaggagagtgtttctcactttctctctttttttcccccttcccccttcctccttcccacttcccactccccctccccctccccctccctcctttcctgtctgtcacccaggctgaagtgcagtggtgcaattggctcactgcatccttgacctcctggctcaggtgatcttcctgcctcagcctcccaagtagctgggactacaggcgtgcaccaccatgcccagctaatttttctgtattttttgtagagaggggtttttttgccatgttgcccaggctggtgttgaacttgtgggctcgartgatctgcctgcctcagcctcccaaagttctgagattataggcaggagccaccatgcccagccaacagtgtttctcactttcatatttcattactcctttcccttggcttccaggatgttagggagaacttgagtttgaatcccggttctgccacttacaagccatgtagcagtttcactttctgtaaaagaagtatgacggctgtagcacttctgtaaattgtaaatctgtatgaaaatataaggtatattattatactcctaatttttttttttctcccccaactccagtcttggtcttcacaaccagaggtggcaaaactgctggtctgtggactggatgtagcctgctaggtccttaacagtatttacattttgagacaattcacattaagaatttatgactccaggctgggtgcggtggctcatgcctgtaatcccagcactttgggaggctcaggtgggctgatcacttgaggctgggagtttaaaaccagcttggccaacatggagaaacctcgtctctaccaaaaatacgaaatgtagctgggtgtggtagcacatgcctgtaatcccaactactcaggaggctgaggcaggagaatcacttgaacctgagaggcggaggttgtaagtgagctgagatggcgccactgtactccrgcctgggcgacagagtgagactgtctcagaaaatagaatttatgactccagtctaagtccctaccttgaactgaagaattgaatgacatcacctccccattttatgtcctcttttcttattttgtttttctccttggcagttatcactctctaacatacatatttcacttgtcttacctttctcctggttttcccttcccttaccagctaaaatgtgagctccaggaggcagacgttcttgtgtgttattactattatttwtttttttgagacagcgtctccaaaagtttggagcgtctccacaggctggagtgcagtggcacaagctcggcttactgtgaccttgaccttccacactcaagcaatccttctgtstcagctcctggagtagctgggactacaggtgtgggtcactgcacccagctaatttttgtatttttcttgtacagatggggtcttgctatgttgcccagactggtcttgaactcctaggctcaaatgatcctcctgccttggcctcccaaagtgctggaattgcaggcatgagccaccacacccagccttgtttttttttttattgaacgctaaacccacaggtccagaaccgtgcctgctggcacagagtaagtgcttagtaagtgcttgcttaatggttgaaaagtgcactaaattcaatatttctggttttacttgaaagaaacagaatctctaactctgattctctactctcaaatggcaccagttagaggtgaggagcagctgcccgtctgagggtgcagatactcctcagtttgttgcagatctcaccctctgtgttgtatatgtggctacagcgggagcagagggcaggggtggagaagcagtcagtggagatggggccttaacagacaggtgggaacacaaaatgggacggaggcaaggacatggcaagcagaggagataagatgtgctagcaaatgtgtaagagggtgtgatgggccaagggtggcaggtggttggtggcaggcagaagagggcactagagaagtgggctgggaagttggggctgtgtctcacagggcaggccctgggagtcatcaaatttattattagtattagaggccaggcacggtggctcatgcctgtaatcccagcactttgggaggccaaggcgggcagatcacttgaggttaggccaacatggtgaaaccccatctctactaaaaataccaaaaaaaaattagccaggtgtggtggcagatgcctgtaatcccagctacttgggagggaggctaaagcacaagaattgcttgaacctcagaggcggaggttgcagcgagctgaggttacacccygcactccagcctggrcaacagagtgagattttgcctcaaaaaaaaattatatatatatatatatatgaattccttaaatataaaaagatacaaagaaaacaggctgagcgcggtggctcacacctrtaatcccagcactttgggaggccgaggtgggtggatcaccagaggtcaggagttcaagaccagcctggccaacatggcgaaaccccgtctactaaaaatacaaaaattagccaggtgtgattgcacatgcctgtaatcccaggtacttgggaggctgaggcaggagaatctgttgaacctgggggacggaggttgcagtgagctgagatcgcaccactgtctccaaaaaaaaaaaaaacaaaaaaaaaaaacaaaaatgacccgtaacctcctttaacaaataatctctgtagacacgttagaaaatacagaaagtaagaaaatttactaagtccacagaggttcaaaatgatagcaaacaccacctttcctattcatcttcgtgaagttagcagctgccaacagtttgagtactttcaggaaaatagatgtctatattaacaagtatagatttctaaaggtttatgatttttttttttttttttttttttttttttttttttgggagatggagtcttactctgtagcccaggctggagtgcagtggcacgatcttggctcactgcaagctccgcctcccgggttcacgccattctcctgcctcaccctcccgagtagctgggactacaggcgcccgccaccacgcacggctaattttttgtatttttagtagagacggggtttcactgtgttagccaggatggtctcgatgggcccgcctcggcctcccaaagtgctgggattacagacattagccaccgcgcccagctaggtttatgattsttttaagttttattttcctttggcccttgattcaggataatgattaaaaaaaaatatgatgtgctcttcggaaaaaaatttcaaatgatacaagaagcttataatataagcacctaagcctttgtttgtttgtttgtttgagacagagtctcattctctcacccaggctggagtgcagtggcatgatctcggcttactgcatcctccgcctcctgggttcaagtgattctcctgcctcagcctcttgagtagctgggactataggcatgtgccaccacgcctggctaatttttgtaattttatttttattttgcttcttttttttttttttgagacagagttttgctcttgttgcctgggctggagggcagtggcacgatcttgcctcactgcaacctctgccttccgattcaagcgattctttgcctcagcctcctgagtaagtgggattacaggtgcccgccaccatgcctggcttaagttttgtattttcagtagacacagtgttttgccatgttggccaggctggtctcgaactcctgatgtcaggtgatccacttgcctcggcctcccaaagtgctgggattacaggtgtgaggcactgctcccagccgagcctaagtctctttctacttccctgcattccccaaagagatccattataaacagtttagctttttagacttgtttgcgaatatatacatataaagcaattttgcctttytttttttgagatagggtctcactgtattgcctaggctggagtgcagtggtgccgtcacggctcactgaaacctctgcctcccaggttcaagcgattcttgtgccttagcctcccgtgtagctgggatcacaggcgtgtgccaccatggcccagctaatttttgtaatttttagtagagacagagttttgacaccttgcccaagctggtcttgaactcctgagcctaagtgatcttcctgtcttggcctcccaaagtgttgggattacaggcatgagccaccgcgccccgtgtgttttatagagatggggtttcgccatgttggccaggcttgtctcgacctcctgggttcaagcagtccacctgcctcggcttcccraagtgctggattacaggcatgagccactgtacctggtctgtatttacttttgagaggaatttaatagaaatgacttaggaatgcaaatgggataatggtttactgcttatggaatggccttaggaggacatttgtggagagttcttacacccggcagggattagactggattagaatttcacatcaaaatagtctggcaaacaaagtctagctttttctgtgtggagtcctggagtgagtgggtgcaagagggggctgaggcttcacttccgtcttggaggaggtttgttgttgggagcagtctatcttgactgaccctggtgcagtcactgagaaactgaggtattttccaaaaccargttgattatttgaggggaagtgtttgcagagaactttcaggaggctttgggtatggtgggaaaaacactgcactcagaactgggggattggagttcctggggctagcccttcccctcactgggtcctcaggtttcctttacccttagatatgggattgggctagctggtttctagggccctttccagtgggaagagcttgagctgctgttttgcctgaagtgtagtccttgccttccaggagcttgcagtctggtttaatgagagtgttcatttcagctccttccgtccccttgcagtgaaaggatatcatctgctgagcatgagaaggcgaatgctaagaaatggcagcaatcagcccctcttacagtgccacttcaccacccggagagaacctttgccttagccacagtcactttccctttgactggtagaaccaccactgatttataatttgccaaatgcttcatgtacgaaagtgcccttggaacagccctttcaattctgttttttttttcccaggttgattccaaagatagttctcataactccacaaactctgaatttgcagctgaagctgagggtcagaatgatacaattgaggaacccaacaaggtccagaaaaggaagagggatagacttcgagaccagggctccacaatgatytacctgaaggctatccagggcatcctggggaaatcgatgccaaaaaggaagggagaggctgccactcgggcaaaaccaagygcagcagagcrtcccagccatggagaaggaccagccaggagtgaaggaccagccaagactgcagaaggagcagccaggagtgtcacagtcactgctgctcagaaggagaaagacgcaaccccagagrtcagcatggaggaggataagacagtgccagagaggagcagcttctatgacaggagagtagttatagaccctcaagagaaacccagtgaggagccccttggggaccgaaggactgtcattgacaaatgctctccacccctagagttcttggatgactstgactctcatttagaaatccaaaaggtgagtaaagcttgyaccaggcatctgactttttagttctsttgatgaaatgtgttccatctttctagtttgatcctaagtgttactaattaaaaatagtactttacttaaccaggcctccaggraacaaactgatggttttcttctaacatacttttcagattttcagagttattaataaacctaaactaagtgcttttttttttttttraaggatttatatgttaggatatgggtttagctgctgtgtaaaaggccaaaatcacagtggcttraacagaatataagtttggcttaagaaggatggctccatcatgtcagagatactggtaccttttgtcttgattctctatcacccctcaacacagtgtccatctcttggtgtgaaatggatactctgataggactcagggtttgttatctgggcattctggccagtgggaaggggagaagaggagagtgcattccttccctkttaagagcttggctcaagagttgcacatgttgtatctgctgttgacaagagcggggaaacccggctgacacctggctgcaagggagtctggaaaatcagcctttatctaggcagacttgtacctggataaccagagaagaagggaaggatgtcattggacggaaactagtgatttttaacatagcttataattgaggggaagcattcctccatctttttctttttttttttttttttgttgttgggacagagtcttgctctgttgcccaggctggagtgcgatggtgcaatcttggctcactgcaacctccacctcctgggttcaagcaattctcctgcctcagcctcctgagtagctgggattacaggtgtgcgccaccaaaccggctaatttttgtatttttagtagatatgggatttctccatgttggccaggctggtctcgaactcctgacctcgtgatccacctgccttggcctcccaaagtgccgggattacaggcatgagccactgtgccaggccacattcctccatcttactcgtctccacccatcctttactactgctctgcaggcagcttctctcatctttagctctttcttctagtacttaccccatgtttctaaataatctttactgttgatcagtttttcagttttagatgtctgaggacttcttgcttgggcgatgagaatttagttctctatacctccttcagaagcacccacacccagggacacattagcttcccctttctgcagcctccctgtgtggcttgaataccttttgggttaagtctgtgtaagatttgttactgccatgttcacagctgagtcgccttgtatactctgatcacattttctttcttgtaaaacttcattttccttaaagttcatcattactttgtttttcctttggttttcctggtacctttcactaattaatccccaaactgcgagagctgtaaaatccttctcaatactgtcaaaataaggaatctgtttcttttttttctctcttggaggtatacgtcctcagccctctgttgtcctgctctggtctggactgcctgccgtcaggccagctggcagctgtctctctggagcctccttcacatttctcccggattgagtcttctgctacctatactctgtgtcttctcatgttcttcttccttggtttactctcacattttggtggaatactttttctagtagcttcttgagaaagggtacatggagaaactttttttggtaaacatgtgtctgarattgcctttattttacctttaaccttgattacaagcttggttggttttggaattccaggttggaaattgttttgtttgggattttgaaggcattgctccttttcttctgggcttttttttttttttttttttttttgaggtggagtctcgttctgtcttgcccaggctggagtgcactggtgtgatcttggctcactgcagcctccacttcctgggttcaagtgattctcctgtctcagcctcccgagtagctgggattacaggcacacgccaccacacctggctaattttgtatttttggtagagacagagtttcatcatgttggccaggctggtctcaaacttctgacctgaggtgatccacctgcctaggcttcccaaagtactgagattacaggtgtaagccacttcgcctggcctcttctggttttcttgatgtctgaagcyatgctggttcctgaaccttggtatatgattttttattttttattttcttttgctttgagacagagttttgctctgtcgcccaggttggagtccagtggcgtgatctcagctcactgcaatcttcacctcccaggttcaagcgattctcctgcctcagccttgtgagtagctgggattacaggcatgtgccaccacacccggctaatttttgtatttttagtagagatggggtttcaccattttggtgaggctggtgtcgaactcctgacctcatgatccgcctggctcagcctcccaaagtgctgggattacaggtgtgagccaccgtgcccaacctgtattttttttttttttccctctgtggaatcttgtagaatatattttgatctcagggctctgaaatttcatggtggtggtgtctactttgcttagcatgggacattccctttcaatctaraaacccttgtactttagctgtgggaaaagttcgtgaattactgtacttcgctgatgttttctttccgtatttttcttctctctttctctctctagcttctctaccttctttctcttatttggatgttggatttttcaggactggtcctgtaattttattgcctttctcccttgtttctagccaatttcttgctttactttgtaggatatttccttttctttatcttccaacccagctgtttatttagttttacttttctactgtcatgctttttattatccaagagctcttttgttttttaataacatctctgttcttgtttcatcttctgttatctcttttagggagttcatggtagttttttggcttggttttagttttctttaagttgcttctttccgtttcttttgatctcttctgtgttagaggctgccttcacatgtctggtaatctttggttgtctgtttatgatcaagaatgggaggattaaaaagctgtttggaagctctgagcgtaaagactttgagctttgctttgggatgatcggsagaayataaccctcttccccttgccatgtcactgcttttaggaaagcctcgagactggtcaccttgcccagaggagtgtttttcagcctgcttaggaggaaaggtggctgggagctgggtagcgaaaggggcggctgcgggggcggcgtcagcattcacttaatctttgtctttttggtgcagtaccagtgccctccactgagctgaccaggccttattctagagatcctcttgttttactgtcttcaaacaactcaccttctctgagtatgaggagggaatctgggatctaactcattggaaaccagatttcaccctgtcctcctccttttaatgttcttctgtaactccagttcctccagttcccaaggtgcccagtaccgcgagtgcctgctctgttctaagctttcctggtgcctagcttaggtctcagccttctcttggtctgccagtgaggtgttatttggccatctgctttctagcctccagtgcgtgatcactgtagtctcttgttcttcctgttctggtgtttttgttattgtagaggggttttatttgttttttgtttggtttttagattctttagttttagtgaggtttcaggaaagagtaaaataagtcgaatttgttcagtacatccttagcctagaaaagttctgggaaaatttcttgattatttgatttcttgtctgtttcttctttttctggaccatctattttatgcttggtctttcggatggaaattccaattttcttttcttcccagtgaatcctttttaaaaaatttttctggatggtttcttcaactttatcttctttttttttttttgagatagagtctcactctgccacccaggctggagtgcaatggcttggtcttggttcactgcaacccctgcctcccaggttcaagcgattctcccgcctcagacccctgaattgctgggactataggcgcatgccaccatgcctgtctaatttttgtatttttagaagggacggggtttcattttggccaggctggtctcgaactcctgacctcaggtgatctatccgcctcggcctcccaaagtgctgggattacaggcgtgagccmccgcgcctggctcaagtttatcttctaacgtttatgttgattttttttttttggtcttttttttttttttcctgtgcgtgktttttttttttttttattgctgccaatttttttttcttttttgtctttttgagacagagtctcactctgtggcccaggctgaaatacagtggtgtgatctcagctcactgccacctctgcctcctgggttcaagcaattctcctgtttcagcctcctgagcagctgggattacaggcatggaccaccatgcctggctaatttttgtatgtttagcagagacaggatttcaccatgctggtcaggctggtcttgaactcctgacctcaggtgatccacctgcctcggcctcccaaagtgctaggattacaggcatgagctaccacgcccggccagaactttaaaaattaaaaattttagctgggcgtggggctcatgcctgtaatcccagcactttgggaggctgaggcaggtggatcatgaagtcaggagatcgagaccatcctggctaacacggtgaaaccccgtctctactaaaaatccaaaaaaattagccaggtatggtggcgtgcacctgtagtcccaggtgctggggaggctgaggcaggataatggcgtgaacctgagaggtggagcttgcagtgagctgagattgcaccactgcactccagcctgggcaacagagcaagactccgtctcaaaaaaaaaaaaaaaaaaaaaaaagtttttgtcatccaggttggagtgcagtggcatggtcatagctcattgcacctttatttttctgtggtccccttggtttaacttttccaagcatcaacttttgtcctttgctgggtggggaaagggcaggccatctgcacagggtgggagcaggggtctggagatcttgacagacttcagctaattcctattttcatctgcggcttcaccctcactttggaagtctggcacctccaattcctgagtctttctggggtcctgtagtctggttctgggtttttcctcactgaaggcttaggttttggccatctgatcttcttggctgataatcattaacccatctgttttctatgctctgttatctgtgaatagcatccaatgcttatttaatttgctttgctgttcattttgtgtgctttccccttgtaggtttataccttttcggatatatttcctgtaactttagaagggtttttgggtgggaaggacaaaaactrtatgctatatatataattggaaattcccacataaagtaggtttgtaagatattttcctcccaaatatgtaatgggtgtgttttctgtctaatgtagatcatcttacttggttgcctctaattccattgtgtggatgaattttctaaagttatacccaaacttctatttatgagactggacgacaattaggttttctcttacgtatctatttggagacagcacagtatggtaggtgagcatgtgagtgttgggatcagaccatttgggtttaaatcctggccctgccactcgaattaggatcttgagaaagtcagcctctttgaaccccagtttcttcctgtgtgtaaaatgggctagctcttcaaatgttaccacttgtaaaaagctaatacagggtcagatgcatttttgggtttacagcctctgttgcagcttttcarctctgcatgaaaatggccatagacaacgtacaagtgaatgggcctgactgtattccaatraaaccttatttacaccakcaggcakkgtgttgttcagtgaggtttcaggaaagagtaaaataagatgaatttgttcaatccatctttagcctagaaatgttcttgtgggctgcagcatgtggaactctgaattcatacrtgattactctttgctcagtgcccagtagtaggtgctcaataaatgtaactttaaattttaccatacaggcttaaactaactaaggcagtctttttttttttttttttgagacagagtcttgctctatcacccaggttggagtacagtggctcactgcaacttctgcctcccaggttcaagtgattctcatgtctcagcctcccgagcagctggggttacaggcgtgcacaaccgcatttggctagtkttttgtatctttagtagagatggggttttgccatgttgcccaggctggtctggaattcctcagctcaagtggtctgcctgctttggcctcccaaagtgctgggattacaggcgtgagcccccttgcccggctgagacagtcttgaatatcggcagtctcctcctatttcccccacaccccccgacaaaaaaaaaaaatctgaaaacattttcttggccaacttgactctagaaacctttcaaggatttagatgacataattattatgtctgtttatggtgtatgtttctagttacatgtgcatttttgaaactgcttttttccttactttgacattttcctatccagtctgattaaatttccctgtttgtttgatgattgttttggttcatttgaaagaggatccaaatgagaactgtatgtggcaatttttaaatgtgtcaagtctcttcgtctctatagattcatccttttctccctccaaaatgttgtaatttatttgttgtaaaaaatggggtcatatgtctcgtttttgctgatgagaatatagtactttttgaatctgtgtattgttcttggaaattttattccaagttgcaaatagtcatcatatcacattgaggcagtctgtttccgtttttcctcgaggtgtgtttttgggattgccataatgtgaccacctccaattattttgcagacatgttaatgatgtgttactgtatatgataaacattttaactttcaggtgcacctatacaaaastagacttgtagttccaatatgtttcactagaaaattcagcagggaaaaaaaacaaaacagaacacaaaagccttgtcaaacttaggcaagactgtaattttttattgtctgggttgatggaaattttctgttataaccgagatagtttttgaaggattgttctcccttatagataagtttttaaaggttttaggggaaattgcaaacattcaaagtaaacagaatagtgtattgaatcaccagrtgcccatcacccagcttcaagagttcagattaaattaaaaatgtgctacatttaagttagcttgcattttagaaaagattcttgtttggatatttctgccattcaagcagtagctgtgagaagtctaaggcaggaaagtataaaatgggaaatgggtaattcatttaagtgttggttactaatacttgtttcctgttagagtgtagttaggggtatgaaatattagtacagccaacataaacagttttgttccattttaatcaggtaattcagctagaatgctcttycattgtgaatgtttgttttattatgtgaattacatatactcataaaagtattaagagaactttgtaaggcctcttgctcatcaagccttctgtcattggcaggtatagatggctgctttaagaagaaatgatggcacttaaattttgtttccagcatgaattgatattgatgtgcttactgtatttctcaaacctggtctgcatcacaattccggggagagttaaatgcagattccttggccccaccttggacctattgaatcacaatatctcagggtggaatgggccttaaaaatctgtttttaaaatgctrcccagttgatggagatgtgatgctaagttgaggcaccatttattctaaaaattaattcagcagatattcatgagcactcagtatctgccaggcactgttctaggtgttggggagacatcagtggaaaaaaaataaaaattcctgatctcgtggcgcttaccttctctagtaggactaagccgatttaatgcaagggatggttgtttcagtcactattactagttagtagcttaaaataacttttcttttgctctcagtactgtgggtcaggaatttggaaaggcctagactggggcaggtgtttcttggggagccccatgtagttcctttcagattttggcgagggctgtcgtcatctgagagtgtgactgggctggacatccgagatgttcacttacatggtggacagatgttggctgtcagccagtaagtcagccaggctgtaaactggcacacctacatgtggcctctctagcaggatgtcatttgggttgccggacktcttacatggtgcttggcttgctccagagtgagcaagtggagtgaaccagatggaagctacaaggcccttctgacctggccttggaagttacacagcttcgcttctgttgcattcttttggctataagtaagtctctaggtaggtccagattaaggggaggggtcatagaccccactctcaatggggagaagggttaaataattcggggacacgtttaaaaactgtcacaatggccaggtgtggtggcttatgcctgtaatttcagcattttgggaggccaaggcaggaggattgcttgagtccaggagtttgagaccagcctgggcaatatagggagaccccctacctacaagaaattagccagatgtggtggtgcgtgcctgtagtcccagctacttggatggctgaggcaagaggattacttgagcccagtagttcaaggtttcagtgagtcgagatctcaccaccgcattccagcctgggcaacagagcaagaccctgtctgaaaaaaaaatacaactgccacagctgttgtaattttacattttgaatatattgacgacagtgtcagagaggaaaagctgggcastgyttttctctaaaatctccaatccggagtgtgttctagagagcagtttttctcaagagaaagggatgcaggtagagcaccacctttaggagtagcatgatgaggccatggtcacaggcctattccctgaacccaatacagctgttcacagcagtaacttggctcagttctggacatttctggaaattgtaaggaaaccaggtgacagggtgagctaatgagccaatgcaaagccatcaccatggccagaagaacaagccagggtttatgttcagctgatgacagcctgggaggccatcttcacntcggaaggctaacccactgttgtatgccttcttttctgcagcataaagatagggaggtggtgatggagcacccctcttctggaagtgactggtctgatgttgaggagatctccacagtcagattctctcaggaggaacctgtctccctgaaaccttcagccgttcyggagccttcttccttcaccaccgactatgtcatgtaccctcctcatttgtacagtagtccttggtgtgactacgccagctattggaccagcagccccaagccttctagctacccctccacaggcagcagcagcaacgatgcagcccaggttgggaagagcagccggagccgcaygagtgattattcccccaactctacagggagtgtccaaaacacctccagagacatggaggcctcagaggaaggctggtcccagaattctcgttcatttcgcttctccagaagctcagaagaaagagaggtgaaggagaaaagaacattccaagaggagatgcctccgcgtccttgtggaggacacgcatccagctccctgccaaagagccacctggagccaagcctagaggagggcttcattgacactcattgtcacctggacatgctctattccaagctatctttccaagggacctttacaaagttcagaaaaatttacagcagctccttccctaaggaatttcagggctgcatctctgacttctgtgatccccgcaccctgacagattgcctrtgggaggagctgttgaaagaggatctrgtctggggggcctttggctgtcaccctcattttgcacgttactacagtgagagtcaagaaagaaatcttttgcaagccttaaggcaccctaaggctgtggcatttggagaaatgggcttggattactcttacaagtgcaccacgcctgtcccagaacagcacaaggtaacaaggctctctttagtctgcttatagttttaatttttcttttagttgttgaagcctgacaataagggtttatctaattttagaagtaaataattgagaatccctgaaaacgcagtgtgcttgctctcatccagaccatctagatgccatttgtcaaatgctttacaagctatttcttactgttcagctttattatggaagatgagggagaagtactttgtgacttcttatggatgatatcaatgtcaaaacatttgttttctttctttcttgggaagcaataaactttaggttttcttaattkattttttgagagggagtcttgctcttttgcccaggctttggagtgcagtggtgcgatctcagctcgctgcaacctccgcctcctgggttcaaactgttttcctgcctcagcctcccaagtagctgggattacaggcgtgcatcactacacccggctaatttttgtatttttaatagagaccatgttggccaggttggtattgaactcctgacctcaggtgatccacccgccttggcctccgaaagtgctgtgattacaggcatgagccactgcgcctggcctgcattgttttttttaaatatacccattgcagaatatttgaaaaaatatgaaaaaatgcataatttcccattcaaccagagatcatggctaatactctgttaatatttttttctttttctttttggagacagaatctcactctgtcacccaggctggagggcagtggcacgatctcggctcaytgcggcctccacctccgcctccgcctccgcctcctgggttcaagcgattctcctgcctcagcctcccgagtagctgagactgcaggtgtgtgccaccttgcgtggctaatttttgtatttttagtagaggtggggtttcaccatgtttgttagactagtctcgagctcctgacctcaagtaatccacctgcctcggcgtccgaaaagtgctgggattacagacctgagccactgcgcccgccccctgttaatattttttttcctcccaatattttttgagcatagtgctttggcagggtaagagttgtagtattttagaatttcttttctttttttttcagagataaggtctttgtcgcccacactggagttcagtggtgcagccacagctcactgcagccttgacctcctgggctcaagtgatcctcccacctcagcctcccaagtagctgggactgcaggtgcacaccaccacgcctggctaattaaaaataaaaatttttttgagatggagtcttgctgtgtcacccaggctggagggcagcggtacgatctcagctcactgctacctccacctccccagttcaagtgattctcctggctcagcctcctgagtagctgggattacaggtgcctgccaccacacccggctaatttttttttttttttaaggcagagtttcrctcttgttggccaggctggagtgcaatcgcatgatattggctcactgcagcctccagttcccaggttcaagygattctcttgcctcagcctcctgagtagctgggattatrgactcccgccaccacgcccagctaattttttgtatttacaggatcacacctgtaatcccagtattttgggaggccgaggcaggcggatcacctgaggccaggagttggagaccagcctggccaacgtggcgaaaccccgtctctattaaaaatacaaaaattagctgggtatagctgggygtggtgactcatgcctgtaatcccagcactttgggaggccaaggcgagcggatcacctgaggccaggagttggagaccagcctggccaacatggtgaaaccctatctctaccaaaaaaaaaaaaaaaaattagctgggtgtgatggtacatgcctggsgtcccagctactcaggaggctgaggcaggaggattgcttgagcctgggaggttgagctgcagtgacccatgattatgctccagcctgggtgacagagtgagaccctgtctcaagacaaaattatcagggtctcaggtctgcacttaaaggtccatggggcgacctgcacaacaaactgaactagaagcgataggcatagggggataaacacagtcttgaagatgtcatttggcttggtgagatttgactcaagactggaagataatgagtctgaggagttgctggctgggagagggctaagctgcctgtaaaggggaggaagactagaaaatatttgtcaacaccagagactcctaggctgggtgggggatatggacactgttttgatgtaaataaaaaatttggcacccaaatgaggtgaatggtggtgactggcaactgcacctagttggatgtcagtgctgagttgcatttacctaaaagagcagttagcaagttctkgatgtgtcctgctgaatgttttatcttgtgaagggaagaagaagaacctatagagggctgggcgaggtggctcacgcctgtaatcccaacactttgggagtctgaggcaggagattgcttgagcctaggagttcaagatgagccaaggcaacatagtgagaccccatctttattacattaaaaaaaaaaaagagcctgtggaaggtctgtatctgggcaagatgatagggtgacagaccctgctcattataggagagtttggttgatgtacctaaaattttctggaaggattggaaaatagagaaaagcaaaacaattggggaaagaatgggtagttatagttattctgctggttagagcaaattactgttaacgttttctttgttgatctgtggtgtttacagattaactatgtaactcataagagttagatcctgaatagtttgtgtgtaagttgcacatgtcagcatctgggagggatgccagggagagtagactgtccttccctacccaggctgtatctctttacttgtgttaaagaggaattaattaattattaaagtaataaatatgcaagagatgcctggggcaactcccaggagagactaactctggaatccctggaaataatggatcagttaggaagccaaccttatgcaggtagaagtgagtaattatactgggtaataactcatctgtacttccttcactcctgttgtttttcagctgggttcctggtgaggacaaatgctgcaaatagctcctgtccaaccacaagttcctgcattctaatgagttcttcttccttcttaacatttttgaaatctggatgtgtttcatgaaacattataaatgtaatgttattgttccttggaaaattgyaaggtacaatacaattgcaaggaacagttgcacagtggcttgtcttccatgcacctgtcgtaggttggatgtgtgtgcttgtgttaaagaaagaaattaggaaattaaatagttttaagtgtcttttctactcgtgaaattttcccattcatcagctatactttgaaaaatgtttaacagctgtgtaatattctatcctaaagctctaatagtttatttcactactctgagggataattttttagaggcaggaatgaaatgttggaattggaatctcttgaaacctctgctgcctgtgtgtaggggtcggggagggcagatgaacagcttagcagatgcaaataggaggggctccagccacctattgatagtggaactggccaggctttagataaagcctctgtcaagcagtctataattttgatgtctgtggtcattttcctttctttgaaaacacagattaaacaaaagttacatcagaattggtattggcttagtgttgctattttgagaagaggcagtacrggtgttagacttgtaaatattctcaagtgaatatcacctgactcaaattacaaaaagtatctcattgtttgatgctgaaaacataaacacaaattatgttccacagttgtagaaactactcatggaaacattaatatgaggtaatttgcttataatgaattaattttttttttttttttttggagacagtcttgctctgtccaggctggagtgcagtggcatgatctcagctcactgcagcctttgcctsccaggttcaggggattctcctgcctcagccacccaagtagctgggattataggcacctgccaccacacccagctaatttttgtatttttagtagagacagggtttcaccatgttggccaggcttgtcttgaacacctgacctcaaacccgacttggcctcccaaagtgctgggattacaggtgtgagccaccacgcctggtgaattaatacttttctttgttctaaacctgggctcgttagaggaaagaacaggtcctaactctacttttttcatttaaattaacaatagtgaagatttaaaagtgggtagtgttataaagagtaaagtatatttgtagttattgacctgcgaggatacgcgattttgattgagtaaaggaagcaaattggccgggcatggcggctcatgcctgtaatcccagcactttgggaggctgaggcgggcagatcagttgaggttagtttgagaccagcctgaccaacatggcgaaaccccatctctacaaacaaatacaraaattagccaggcaaggtggtgcctgcctgtaataccagctacgcgggaggctgaggcaggagaatcgcttgaacccaggaggtggaggctgaagtgagctgcaattgcaccactacactccagcctgggcgacagagcaagattcggtctcaaaaaaacaaaacaaaacaaaacaaaaaaaamaaagcaagttgtagaaaataagtgtagtatttgtttctttaacaaatatttgagtaccttctgagagccaggcaccttgctggagatgcacacaaacaccacgccctgccgtccccaacagctctgcataggagaggtctggaagttggtatctcttgagagcggaggtggggacagtgaggtgagggacattaactttgcgctttatgttcttgatccctgccctgcccctgccaccccaggtcggcatcatatagtggttactgtgtggaatgccagggttcaagtttggatcctggtgctatagctgctggctgcaagttaacttgccctcactgcatgctgcgcagacagcagcacctgcctcagggtggttgtgaggactgcaggttatgatagacgtgcagtgctttgggcactacctggctctattgtaagtgaccaataatcattagctattattacattatatagttaaaaaaagagagacacagggggtgcctgctggactgggcgttccagaggtgatggacttctgaagtgctgctaaccaacaggggttgtcgctgtgtcctctcctaggtatttgagagacagctgcagctggctgtgtctctaaagaagcccttggtgatccactgccgagaagctgatgaagatctgctagaaatcatgaaaaagtttgtgccccctgactacaagatccataggttagaagactggaacttcagcgggcaaatgaaagaaacacttcctctgtcaagttgatgaggacagcaatgatcgtattctgtcattatacactatctattcttttttttttttttcgagacggaatctcaccctgtcgcccaggctggagtgtagtagtgcaatttcagctcactgcaacctctgcctcccgggttcaaacaattctcctgcctcagcctcctgagtagctgggattaccggcacatgccaccacgcccagctagtttttgtattttaagtagagacggggttttgccatgttggccaggctggtcccgaactcstgacctcgtgatctgcctgcctcggcctcccaaagtgctgggrttataggcgtgagccaccgtgcccggcctatacactatcttttctaaagaattaactattaggttaaaccacttgaaatttctcatatttgacctttttttttttttttgctcacaaaatagtaacttcgtatggtttgaactaataaccctaaatcaccagtgagcacaaggggccttttgtgcccccatcctggggatgggcagaaatggagtttcagttctcagcagtgaggaytgctgatcttgagaggttgctgtggggtgtggtggcttagcacacagagcatcttagggtacttgaaaggacattttctttcctcttttgaacttgaaagctcctttctccccagttatgaaaatcaaggtcatgttttatcagaatggcatctatgggtgcttaagttcagtttggtaaactctctgaacttctgaactcttgccacgtgtaggtcctgggctttggcttgcctctggggacatctggaggtgctgccaggagacaggttggatggtggcttctgcctacatagcatgtgggactgggtggtcataggtgctgtgggagccacagcaggggcccattatcatagcccagccagaagactcaggaggtgatgcctggccggctccttaaagatggttgagaggggttggctgaataacaaggactctagcacccaaatcgggtcttgtcagatggcagaaaaaggaggatggkgctgtcagggcytttgggtacctaagcagaatgagtgaagcctctgacccctggctgctgcacacaccaatgatgaggcagtcagttggcttttctgggtcggttggtttttcattacttcattttgggctaactttgaaggaaatgtaatggtggctggtaggccagggctaaggtgacccaacgaggtggtattgcaggaggaggccctaaatttacagattggtaactatatatatggcaccaagaacatgaacaggtatcagattaagaaaatycacctgtagttcgactccccagtattttgttagatttcctttcagttcatttgactacttgggcatagtttttatatgctgtcgttgtcatcataggggccacagttgttgattttgctcctcttcagtgttagaagcatttcctatcccagtgtgttctctgtggtggtcatctcaggkgactgcagagcactctgtggtgtgcgtggtatctctgagtgatctctgatcactcaccaagtgccatctcggggcttcctgtgttggagccagcccttgtctgtgtttactgtggagtccttccctaggatgcagtctttccatttctgggaatcattgaaaaggggtgatgggtgtggggggagctgggggctgctgcagaggggactgtgagcagccctgatgtggagttctgtctccaggcattgcttcaccggcagctacccggtcattgagcccctgctgaagtactttcccaacatgtctgtgggcttcacggcagtgctgacatactcctctgcctgggaggcccgggaagccttgaggcagatcccactggagagaatcatcgtggaaacggatgctccctatttcctccctcgccaggtaagggggtcttcaggctgagtggaggcaccggagggagagggtggggaggtgggtggtcacccttacaaggttggcagggccagagccccagtgacttccaggtcccatcctgggctgtgtagatgcctccttgctgttactctgcagaaccaaaagtctagggggctgagaagctgaagggtaaccactctcttccaggcagtgcaaagccctaccctgtagagggtagtccaaggaagcgtgggaccctgctcacccagagcccccatgactaggactctccctgcacctgcaggtaaaggggtctctacagggcagccccaaagaggtccttgctggggaagggacagggagggagttctagattatgactgtgcacacatggcacaatgatgttatgaccacttgatgtcttccaggttcccaaaarcctttgccagtatgcccacccgggcctggccttgcatacggtccgagagattgccagagtcaaagatcagccactctccctcaccttggctgccttgcgtgagaacaccagtcgcctctacagtctttaagcagagaaggtacagtcctcgggagtctcctagaaaaggtcgtaaaactcacattctgtatkttttaaaaaccaggacaagtcttttgttgcattttgttaatgtaaagaatataaacatagtatgagcattaagcctgatttgttttgagtgacrtggtttggaaccttcttctttttctcttccaccctccagggcgaccagcagcctgacagaacacaggctggcttgaagtctgtgtctcaggtcgaggatgtgwttagagagctgattggaacacagaaaaccaggacaggatgttttcctccaagcgggtcataaggcttcagcttctgggtggtgggtggggtggggtgggcatggaatgaggggtatggggactgcctgtaatagcactgggattttgcctcccagccaaaatgctccagggtaggcagcaaagaagaaagagtgcgatatgagggtacagtgagtttggcagtccaaattctgttctctgcagcctgtttttgagtagttkgtgaataaagtcacccgcctacttgtctaagcacatgtgggtgtgtaactcagttcctggttctcggttctaaaaacagacttccaactgggaaactttttgggggaaattaactggacacctatctcggaggtttattttcttgcaaccagtgaagtcgtcctcctcccttccctggataactcttcagtttgactgtcactgttctggtgtcaactccagcgtcggcacaggcagaaggacttcagctgctggtctcattggttccactgccattgatatgggggrgtgcagaggagcactcattgtccatgatggagatccaggacagactgggggactccgggaagaggctttcttggggaagaggaccccaaaggaggtacttcctcctcactgatgccctcagggctgctgtgtgggtgtgttaagctgataaggttcagtttgcggcggaaactacctgctagtcttgtgtcaggggctgccagcctccttttgtttyacttttgcccccttcttgggaacatttgaccaaaaataatcctcatttcatcttgtgtacagtcctttgtgtamcccgcccaggttgagaggtgaatcagcgtaattctccgaagctctgctgggcagctcagccatgttacattgtctatgcagaataagcaggcctggtgtctgcaaatgtaccagtccttctcccgcatctcctgggtgcccccttggctttgcctctcctgtgtcctgtctttctgcgttttagaagtgagagcctctccttcaccttttgagcaactgagtcatctcaagtcctgagctctgctctgccgcctgctggtgccttgtaaaggtatactcgttacaggccctagaggttctaatggtccagggttaagtgagaggagactgtactttgtttcaaaggatccttcaccctgatctgcagtgaggtggatagatcacctggagtccctcgtctgtggtcttggaggcttaaattgtaaaatacatcccttatggaatcctaaattcctctaggtgtttttggaaggcgcatttgagccttgtgagctaaaatggaatggatttaatatttcctatctggcatttccatcttgcccctggtacacaagtcactggcctggaactcagccttgattcactgtccgtcttcacggattagctgtgctgttatgttgtctgtgctgcagattggcccatgtgggaagtcgggggggacctgatttcctgcttggaagacttgggggactgccgagcatatcaaagtgttyatagtcaccaagtgaactgcagcacaaccatctcctctccagcaagccctgaagtcagtagtgcctgcaggtgaaaccaaccagccctgtgttagaggaggaaaagcggagatgacatggaagtctccaagcctgtgccatccacctgccaaggaaaagcacaaggtgctatctacttttctctctaggatttagattatcatttatgtgctgttgcacagtgaaacctcacctgtgtgggcgtgaaagctgattggcattgtttttgattcagctttttggatggctaattgttttcactgtgctgtgggaatgcctctgtattttttcccctctttggccatctttttctgaaaataaagtgatggatcctctagccaacccagtctctccgtgtttgtatagacttacctgagtgatgcagtggtttagtctggttgttggccagcattgtaacccaagaatccaggtagctggagactttttttctttcttttttttttttttttgagaaggagtcttgctcttttgcccaggccagactgcagtggcactatctcggctcactgcaagctccgcctcctgggttcacgccattctcatgcctcagcctcccaagtagctgggattacaggtgcctgccaccgtgcccggctaattttttgtatttttagtagagacggggtttcaccgtgttaaccaagatggtctcgatctcctgacctcgtgatccacctgcctcggcctcccaaagtgctaggattacaggcgtgagccaccgcgcccggccagctggagactttcttgagtatctatgtggctctctgtaaaattaaactgcatataagaattcttaaagttcggccgggcatggtggctcacttctgtaatcccagcactttgggaggccagggcggacagatcacttgaggttaggagttcgagaccaagctggccaacatggtgaaaccctatttctactaaaaatacaaaaactagctgggtggggtggcacgcgcctgtagtcccagctattcgggaggcttaagctgaagaatcacttgaacccgggaggtggaggttgcagtgagccaagatcgcagcactgtaccccagcctgggtgacagagcgagactctgtctttcccctccccccgcctccccccagaaaagaattcttaaagttctacagccttagagtgttaagtaattttactgtctgggaactcagatgcactgcttctttctgacctatgtaggtactttcttttcttttttttttgttttttttttgtttccagctcaaggctgtaggaggaagaaaaatctagtccctgggggtactgatgaatcagttggatggtgggcgttggactgtgaattcctgatgcctctgggtaaactctggaggaaattctgtttcattacttgcactcagccctcctattttgtactaaggtattcttgaatacaagtgcaccggccaaaaaagtaaacttacgcataaaaagaaaggctctcttccttccaagaatgctgaacacctttgaagtctctgttgctgcctcatcttttagatacaatcattgattatgtatttttggcatcgtcctgaactttgtttcatttccttcacagttgaatgtgcagttggctttgtccactcagtgatggtccttgtgactgttcttggcttttctgttgtttttccatctttctataggaagcttgagaccgatactcatcgtttgctttcagcaccttaattttgctttgttcatttttgtaaagtaagggcaaatggccaccggaatgtacagtgattaaagaagcaaactctgtcaaagatggtgattagtggccagccagtccctctcaggatcactgtattaaaaagtgctcatttgccagtgacatttttttttggttttggtttttttttttttttttttttttgagactgagtgtcactctgtcgcccaggctggaatgcagtggcctgatctcagctcactgcaacctccacctcccaggttcaagtgattctcgtgcctcagccttctgagtagctgggactacaggcgcccaataccatgactggctaatttttttttttttaaattttaagtagagatgagattttgccatgttggcctgtttggccttatactcctcatctcaggtgatccacctgcctcggccccccaaatgccagtgacatttgtaggtggattcagattaaggtgggtagcttagttgaggcgtctcaacccttttctgtgcactctctcaagatgatttctgaacacacaactataagtgcatgagaacttaaatacgtgtgctcttatgctaattatacacaaagtaaaagttttttcacaaggagaatttttttctccagcaaatagctcgctcaccctaggggtacatacaccccactttagagaccctcaagttacagtggtatcattaaacgatccataaaggagtgggtttaagaaagctgatacaggaacatgtttgaaataatacattttctcaagggtgtcctccaaccattttctttgataaattatatttctgcccattgttgacttgaaattgtcctcacccctctaccaagttcacccagtgtattctgaaggaaaatgaatgaatatggaaacctctctcatcctaggcagtagagcgagggaagctgcactggctgagaggctgtggaaccggatgaaaaagcagcccctgagtcctgtggcgttggctgtgagtcggccacgtgcttgctgtgtgctttaggaaagttacttaatttctctgagctttagttttctccctcataagtaggcttgctgtgaaaatgaagtgaaatcacattaatctgcatgagcatttaacacggtgcctggtgtacatcaggggtgtgacagtgagtgctggctgctgtagtaattgaatgcttagctacgtgccgggccctttgccagctacagctcatgtgagacctcatgttcagtcttggcagtaacccagcaaggtaggcattttacatgtgaggagcctgagaaattcagtcttggcctggatcacagagctggtatccaaattcaggtccgaggccaaagcccagatctttgcactacaccttgttgcctggcacaggtgagagtgcccagcccatagtgggtgcgcaatatctgtttctatttgaatgacccaggcaggcggttaataatgcttgtgatttctttgagagagaagtaagttcttgtctttggtgggggaagcatcaggtgaccagcatttgtccagagcctggtacccatcctctcccaagcccaatcagtggtgctttctcaaaaagaaaccatctcctgaccactttggccatattgggcctttgctcctcttctgtagctattgataagagggctgtgggcagttagtgataatcaaggtcgtatcccaactaagtgacagagctgagacagttaagttccaggacaagtgtgttgatctctgtacccacttgtgccaggtgcctggggaggtaggggcatggctgtctgagggtggaggggtgagtagggggcctgcagtgtgctgtgacgcctgggaaggggattctaagccatttcccatcagccgtttactaagtagcctggggatcttgttaaaatgcagatcctgatagattagggctggggtgctgcccaagattctacatttctaagagtccctggatgacggtggcattcacagaccacagcttctatgtgagggagagcagttgggtttctgtctgcctgccgcacctgatcagtagttagtgcctgcatgtgtggcggccagaattttacttggggagacgctcggctcctagcaccctctgtggtaggggttttccagagtgtgggcattaccccaactgtctctgcagacggcttcctgcatgtttcccacaagcgctcagatggctgaattggcaagtctgtggtgctgctctttggggccacctcgttctttgcctttccctccccttagcgatgtgtcccatccgttgcctacagtcaagtcagtccacatgtttaggctaaggtgggcatgaccgagtggccttcccccgggaagaccagtgtcgtaactggaattaagttgtggaacataagagtcaaggctcgtgtctgctgtgaactggagttgagggaatgtttggggatcccacctggtatcagtaagggaaccayggcgacggccagccttgcccatgtgaggcatttgctttgtcaggccttctcagtagtggagaagggaggaaggagaatgcagctctttcagtgctgtctagcagtgcccaagagccgtgattgggcacctcacttaacgtctaacttcagattcactcttgggcattcctgtcttcctctccaatcttgaatggatgttggcttcgataatgtcatcctgaagtttctttgtccacacagccctggctggttgttaataagctgttaatgcagccttgcactcaggaagccctgatgtttaaaggaactgtgtctttgttcttcctctcttccctctttctcttagtcccactttatctcttctttctcttcctctccctcctccttttcccctctccctcctactctccccctttctctcctccttctctaagaaacccagtcttaattccacacaatgcatgcacatgcagtagcttctctgcttgagtgagctggtgtgattaggttttctaaacatgcacattggccttgctacttgtccttttattcccttcccacagaccataaaccaagaattatttttatttgtattattttgatttttttaaagtaaaatattaacttttcctctttgaaataaattcccatttggaacatcagcatacagtttgaacatttattcgcctcctgagcttgtacaacagtcgtgggagttgctgcagaagcaagcgaaaagccagatgagcgcttctaaacttagagagaggtgagtaaggcttgtgggcgatcacttgtcggctggggcctctggaaagcaagaggttgagtaagaatgctgggtgcaccgtcctgctagtgcttttcttccacggtggtgagattggaggtgggatgtaatggtgggggttgtggggaagcactggccttggagtcagagggcggcactcaagtgtggactgttgtgccctgggcaagtcacctcaaagctctgagtcttggtttcctcgtttgcacagcggggtgaatgctacccctgctgttccccaggggtgacgggtcaccgccttggtgaggacagtgctttgcagatgtgcaggtgtttctgccacctcaatcagttgggcggtttcttttttttcttttacaaggtgaggggattcaaagcaaaccctttgcttaactcaggaagctctaatatttgaaggaactgcttaacaggctgcagaacctgttctgagtgctattttggcaccaattcctttttgtttgtggagtaaagttacgcagtgaagacggtgtaacaccaaataattgtagactctcacaataggtaaaatagctccattttacagttaaggaagctgaggttcaactgaggccccaaagctagttaatgtactagttcttagaacattctttgaacacaaagactatgatgaactcccttctgagccactcacaaatactagccaaccactatcctgcagatctttgggaaagggaaattagaagttcttttggagaggcagaggttggggaaaactcatcacccacagagtgaactcccatgtggggctgcaaggaaaccgagcaaacccagtccaggcaggactcacctttggcctcttcccagaggatgtcctgaagaaacttccccagggcctggctgtgctgctggtacwgaacccctgacagcttgattccaacatcaaagggggcgttgaactaggaggcagggcagggaggacccaggagatgtcagaggtcatgcccatccccatctcaaagggggctctgggctctctgcctctcttcaggagtggagagggagaatggcctttgggccccagcagggactgctgagtgacacctcagccaggttctcttcctttctcaggaccacagctcaccttcccactcaccatctttcagacacttaccttgcactctcatgcctctcagccttagcctctaatgggattgctgataaaagctgtggtgccccctagtrtgagattttttttctcccttgcagttttgaagacaaaaggttgagtcaccaatggcagcatttcaggccctggcagggggtctgcccagcattctcagcactggcctgctggccttctattccttccctgctcccagctctttctcctttctctcttgtctgtttcttctcctttttctccttccctaggtattttttctctcatatgcatagacctttctttgatgcctggaa

SEQ ID NO: 95308 - DNA, 15150 bp, Homo sapiens
atcccagaagaaggcattgttattataggaaatgacagctccgtgcgtgttatttctcctgaagaccttcccttgggacaagatttgaaggtggaagacagtgatattgatgatcctaaccctctgtaggcctaggctaatgtgtgtgtttgtgtcttactttttagccaaaaagcttaaaagtaaagtgaaattaaatatttttgtacagttgtataatgtgtttgtgttttaactgttactacaggattgaaacattttaaaattaatgtttacaaagtaaaaatttaaactaagatttatgattaaaaaaggaatttttaataaatcgagtttagccttagtgtagtgtttataaagtctagagtagtgtacaatgatatcctaggccttcatatttactcactactcactccctgactcacctagagcaacttccagtcctgcaagctccattcatggaaagtaccctatacatgcttaccatctttttattattacattgcatttttactgcaccttttctatgtttagatacacaaatgccagtgtgttacaattgttacattattcagtgcagcaacatgctgtataggtttgtagcctaggagaaagaaactattcaatagagactagatgtgttaggctataccatctaggtttgcataagtatactctatgatgttcacacgctggtgaaaatcacctaatgacataattctcagaatgtgtctcatttccatgtgacatacggttgtgttttatccaactgcctatggccttcaaagtttcagctgagactaaaaaccttctgcatagcaactgactatcaacagagtatacagcaacctacagaatgtgagaaaatatttgcaaactatgccttcaacaaagctataaaatccagaatctataaggaacttaaacaaatcaacaagggtaaaacaaacaatcctagtaaaaagtgggtaaaagacatgaacagacacttctcaaaagaaacatatgattaggcaatgaatgtatgaaaaaaatttcagcatcactaatcatcagagaaatgcaaatcaaaaacaccatgaaataccatctcacacatcagaatggtttctatcaaaaagtcaaaaaataacagatgttggcaatgttgcagagaaaaggatatgtgtatacaccgtggtgagattgtatattagtttagccccctaaaaaacaaaatagaagttgcctgctattcttattgagaatcccttggatgtggtgagttgcacttctcttgctttttctagattctcctctcatctttgtctttcaaaagtttataatttgtctttggacttatgctgtgtagcttgttgagtttcttacatatgcatatttatgtctttctttaaattagaaaaattttcagctatcatttctttgaagtctctccacctctctcttctctttctaagacttctataatttgtacattggtctgcttgatggtatgatatatgtcccttaggctctgttaagttttctttgttcttttttgctctatgctcctcacaatcaataatttcaaatgtattatcttcagttcatggattttttttgcatgttcgaatctgatgttgagatgctctagtaaattttcaattcagttattgtaatttttagcttcagatttttgtttggttctttttaataattttacatctccttgttgaaattcacattttttcatctaccattttcctaatttaattagttctttgtgcaagttttcctttagctatttgagcatatttaagacaattttgtttttgttaaagtcttggtctagcaaatctagtatccatctatcctcaggaatgcaatctggaattatttttttctttgaagggtctatgtttccttgtttcttttgtgccttgtaatttttttgttttgaaaaattggtcattaaaataaatcggcaacctcttccagttttagcaaacatgttgagacagacttctgcttgttagttgggtatgctttactctttgtgatcagcctaaggtaaaaactttacatagttttataacttttctgagtgttcatcttttctctgggcatgagtgtggcttttttgattatcctgtatacacagatgcttttgaattccctaatttcctgaagagatttttcatagattttgaggggccttacatggtctcttgtgtcttctcctctaatttcttgccctagtctgtgattctttgtctccctgcagttttcccaagcagcatttggattcaagtgctgcctgaggtccaagttagaacactatattctactctctcacctgagctccaacctgagttggttggaagagagaccagtccttctggctgcctccagacagattggtacattgcaaataaggaattttctcctttccattaaaatgagagtattaaggactaggatactgcctctttcagaggaagattttaccaggctgaggagatagcagggcaaggaagactaaaaatgccattaaatttctgactgttttgaatgtgactgtcttctgatggatgttttcttgctctctgcaggcgtttaactgtttttaagagttctcataaagtttctttagccagcctcaagtttagtttttgggagttgttgtggttttattttttaaaacgtttctatgacagaatgagagccaggggctttctagtttacaaattttgcagacatctctctggaaatttgatttctgataccacatgtttaactaaggacatgttggcataatttgtttttcagcaaatgtttaaaacattttcaattaatttatagcaagtaccatatcttttttttttttttttttttttttttgaaacaaagtcttggtttgtcacccaggctggagtgatcacagctcactataacctggaactcctaggctcaagtgatcctccctcttcagactcctgagtagctaggattacaggcatatgacaccacacttggttaattttattttattttttatactgatgaggtctcactatgttgccctggctgctctcaaacttatagcttcaagcaatcctcctatctcagcctcccaaagcattgagattacaggtgtgagccccaatgcctgatcaatttacagtttctttaaagtcccagttttctaatgaaaataaaaaaggaggtacaaatagttaaagcaatttttaaaatgttaagtttctcttttacttagtaacattgtgatcctgaaattaattaagctggtagatagacagatagacaaatccacacatattatctatccctatctatttatcctattgtaggatgtcctgggattattatattaaaattatgtttcttggaaccaattaagtttagtaaattaaaatattataattattcaataattgtaagttcccactattaatttcaagttttctttcacttcctctaatttttcttcctggaattttcagggaatgaacattttcaatatagaagcaaatattaaatattaaaaacagctgacaacatttatttcttcacctcacattttctcttaaattcagattaagaaggcattttcctcataattttattaaatatatatattttaatgttgcaaaataatcctgtgtgacaatggttaattcttgattctcaaattactatcttgtttttcagtggcattggactcaatgaatcattcctactttttagaaatagtttttaaatttttatttcaggacatacgtactttactagacttcaacttacttcttaagtcatttcttatgggttctaattttctggatcttctttatcccagcctctgattaagaatatttccatggcttagtccctctaccacttttcttcttcatctatattctaccaaggtattcacttccagtcccctgactttagatagcatgtattcactgattcctttttttttttttttcctcaaccctcagctatcacttttggacacaatctatatcaccatctatgaactacagctcttaccagtcctacagttgctttctatttaaaatataaggccttcatatcctttcatctggactattacaatatctttctaacagatcttgttgcttaaattgataatcccttctgaactaccctctatgggttagctagaatattgttgtaaatcaataaggtatattgtattattttcttgccaactatgttgtggtgggttcctataaagttagaacaaaacccaaagtgctactgaaggcctctgaaaaggccctagatgagaagcctgtatttgtttcctaacactgcagtaaaacagaaacagaaacataacacttaaatcaacacaaatgtattatcttatagtcctggagattagaaatgcaaaatggatttcactgggctacagtgaagatgtgttgaggtctgcattccttcctgaggctctaggggagatccatttcttttcttttcacagttctcaaggtgctgcctatgtagtctctggttgatggatctcttctgtctttaagtcagcaatgactattgagtctttcctattgtagtcctctgacactgacttttctggttccctcttttacttataaagaaatctgtgattatactgtgcccacccagataatctactgtatattccccatttcaaaataagctgataaacaaatttagttctatctgaaattttaattcccgtttgccatgtaacataacatattcaaaagttccagggattcgaatgtgaacatcttttaatggcccttggctactgctgaattccaatgcccaattctaacactctttcccctttattccatgcattcgcattagtggcctcaattttcttgctacatgacaagtttgttcccatgtcagggcatatgaatttctgtttttcctgcttggaaaattcttctcacaaactttccaattatatattttaacaattttaatttacaagctgtccaaattttatatcttgagaagtgtttttgatcattctacttgtaataatcctcccgacttcagtcttttccaattaacctctatttttattttaatacatttatggagtatgagtgcagtttttttatatggagatattgtgtacaggtgatatctatgattttactgaaactatcacctaaatagtgaacagtgtacccagtagataatttctcagccctcgtccccctctgatcgtctcaccctcctcccttttggagtctttaatattgattattccattctatatgttcacgtgtacccattgtttagctcccacttataagtgaaaatatgcagtttttgactttctatttctgagttatttcacttaggataatggcttccagtttcatccatgtgactgtaaagaaaatgatttaatatttttataactgagtagtattccaacgtgtgtgtgtatgaaatatatatgttacatatattttatatgttatatatgttatatgttatatatgttacacatactttatatattatatgagatatatatgttttatatatatatatatgtgtgttacatttcctttatccaatcatttgttgacagacacctaggttgattactacacacagaaaagagaacacttacaaaatactagtggtactgtaaattagcacgacctctatggagattctctaataactaaaaattgtactgccatttgattcagtaaacttcctttattttttgtataacatgtatctaccagtgtctctatgattacattgtatttattatattatactgtgtacgtgtgtgtgcgtctatctgtgtactttctgagtcccaaattagaatacaaacccactgaaagtgagaaatatttgtatatttgtcaatgaatatccctgttaactgaaacagtgcttgctacatggtatgtactccataaatagttattgaataaagaaatatacttttgagtaggagacctgggggccggggctgcctgtggacgaccatctgccagcttctcttgctccgtcgattaggaggatcggtggcgacctcggccttcagtgtctccgacagagtgaaatggcggcggcggccgggatgatgctgctgggcttgctacaggcgggtgggtaggtgctgggccaggcgatggaggaggtggcaggcggcaacctcttgtccatgctgctgatcgcctgcgccttcaccctcagcctggtctacttgttccgtctcgctgccggccacctggtccagctgaccgcaggggcgaaaagtcctccgtacattttctccccagttcctttccttgggcatgccatagcatttgggaaaagtccaactgaatttctagaaaatgcatatgggaattatggacctgtatttagttttatcatggtaggcaaggcatttacttaccttctgggtagtgatgctgctgcactgctttttaatagtaaaaatgaagtcctgaatgcagaagatgtctacagtcgcctgacaacacctgtgtttgggtagggagttgcatacgatgtgcctaatccagttttcttggagcagaagaaaaygttaaaaagtggccttaatatagcccactttaaatagcatgtttctataattgaaaaagaaacaaaggaatactttgagagttggggagaaagtggagaaaaaaatgtgtttgcagctctttctgagctcataattttaacagctagccattatttgcatggaaaggaaatcagaagtcaacacaatgaaaaggtagcacagctgtatgcagatttggatggaggtttcagccatgcagcctggctcttaccaggttggctgcctttgcctagtttcagacscagggacagagctcatcaggaaatcaaggatattttctataaggcaatccagaaacgcagacagtctcaagaaaaaattgatgacattctccaaactttactagatgctacatacaaggatgggcgtcctttgactgatgatgaagtagcagggatgcttactggattactcttggcagagcagcatacatcctcaactagtgcttagatgggcttctttttgrccagagacaaaacacttcaagaaaaatgttatttagaacagaaaacagtctgtggagagaatctgcctcctttaacttatgaccagctcaaggatctaaatttacttgatcgctgtataaaagaaacattaagacttagacatcctgtaatgatcatgatgagaatggccagaattcctaaaactgtggcagggtataccattcctccgggacatcaggtgtgtgtttctcctactgtcaatcaaagacttaaagattcatgggtagaacacctggactttaatcctgatcgctacttataggataacccagcatcaagggaaaagtttgcctatgtgccatttggagctgggcatcatggttgtactggggaaaattttgcctatgttcaaattaagacaatttggtccactatgcttcgtttatatgaatttgatctcattgatggatacttycccaccgtgaattatacaactatgattcacacccctgaaaacccagttatccattacaaaygaagatcaaaatgaaaaatgttgcaaggaagtaatatatgtgatcatcactgtaagccacaaaggcattcaaagagaatgaagtgtacaaaacaactcttgtagtgtactgcttttttgagtgtgtaattctaaaagccagtttatgatttagtattttgttaactgaatggttctatcaaatataataacatttgaaacattttcttagagttatgatacttatacatgtgctttcaggaagttcattagtaaaacgattgttcaggagggatctaggtaattggcagattctaaataatataatttccaggtagtaattttaagagtactcatagctcttgccaaataagttcagggtattcaaatcttggactagtcctgcaaggtacaaaaaataaaaatcccagtgagatactttgaaaccacaggttattatttatctgggcaattattgtgtgtgtgaggacggaagggtagggaataatcaaacatctaaagccttgaataagagaatactaattgtttcggtatgatgatactcagaaatggagatgttatagaaaaaaaatcctttggaattttaactaaaatcactgcatataggaaattaagagatccaggaccatatttgataagatttcctaaaaataatgtaattattaatgctaaagactgctcatgtatcttgatctaattactaaataattacatatttacctgataaatatgtatctagttctacaaggtcacatttatgtggaagtccttaggggataattttgttttggctcagttgttccctgcttcctctcgttttttttttttttttttttttttgagatggagtctcgctctgtcgcccaggctggagtgcagtggcgtgatctcagctcactgcatcctccgcctcccaggttcaagcaattctctgcctcagcctcctgagtagttgggattacaggcacctgccaccacatctggctaattttttgtatttttagtagagacagggtgtcactatgttggctaggctggtcttgaactcctgacctcgtgatccgcccacctcggtctcccaaagtgctgggattacaggtgtgagccactgcgcctggccttccctgcttcctctctagaatccaattagggaagtttgttactacttatgttgattaaaacagttaacaaactttttactttttaaaatgtgagatcagtgaactctggttttaagataatctgaaacaaggtccttgggagtaatataattggtcacattctgtaaagcacattctgtttaggaatcaacttacctcaaattataactcggggcctaactatatgagatagctgaaaaaataccacatcgtctgttttcactagatgatgccaaaatattttgctttatgtatattacagttctttttaaaacactggaagactcatgttaaactctaattttgaagacagaatctctgctaatttttcacattaaaattctctttgaaaaaaagaaatatacttttaaagaatatatatagactaccatctatttatctacattgcccagtttaattacttcgagtaaaaaaaacaaaaatccaaagagaaaatatgcaaggttattgaagtagtagaattgggagactaatattctgaattattatttaaattcacactaatttatctctgagaggtgagtcaaatcttgacttttggtatctcagaaaaataaacataatatgatatatattctaattgaagtgtaccttgtgctgacttctatttaatatggcagattcaggtttgtggtaggaactctcacatctcattttgccattccaaggataagaaaatatatatctaaaacaactttcagaacaagtttagctcaaaccaaggaggaaactatttagaaaccagaaagaaaaaaaaatggaaatcatagttaagatttgtgagacttcaagccagcaagatctcaggtaagtcagaactagagaaagacctgaacaatgggagttgggatgttaatgtctgcatgggaatggaaactaaggactttatattttgctgtggaatctagatctgtatgatcccataagcaaggagctatgaaaggctggcaaagattcagaactccttgttctattttgtaagcctgctaatcattcaggctcataacaaagtaaagacactttacacaaagtaaagaaatcaaagtcctaagtctgcaacatgcctgggaatggatgctaaatcatgtttcctaaaggatgcagaaatttcaggtaaatgtacatgagaaaatgctataaacttttaaaattcttaatcttagaagtgcaaatgtaaacatgtgatgtattttctatttgaaaaaaatagaaaatacatcacaataaaattgaactcaaagtaaaataaataaataaataaataaataaaagcaaataaagtcaggttattccagaaatcaaattgtatctcatcacaagaattggcaataatgtaaattttaaagttattgaaataagtatgttcaaaatattcacagacataatactactcaaaggccaagcatagattatgaaaaattatctctactttttaagtgtacttgcatcagaacaaaattacagaagttaaaaaaatattcatcgatattaaaaagtcattgaagaagtttgtttttttttaagtgaataaatactgtacttctcttgctaaccaaaacttttctatctgccatagactatgagacagcctgtgccttgattcataatgctgggtggcctcacctaaagttacgtttcaagaaaaagctaaactcaaaatccaattccactatctctgagcatttcaggcctatagccaggatcacaatctagcatgcttcaggaggccagtgaatccaatggagataacagaccacaaaagttgtcagatgtgactactttatattagaaaatatctggagaatttaagtagatatacattcgggaattgcttgaccacaaaggcaaaaataatttgactttggctgaatgtattgatttaatcagtggttctgaataaggggaaatgttgttctccaaacaacatttgccaatatctgcagacatttttaattgtcaaaattggtggaggataaaattggcttctaatgggtagataccacagattttgataaatatcctataatgcacagggtaatctcttaaagcaaagaatttttcagccctaaatggtaatatcactcatatcagagaaccctaatgttaatgcatttccagggagtctagatttaatatgatacattgagcatctagttctaattgtttctttggttggtttactgtgaggaagtgaaacaacgttgagttattggaaaatccttagaatgatgtggtaaacataaattcagagactattaaagtggattgtaatatgtgatacagttattctattactatatatttctccttagcgactgagagattgtcttgtcaccaaagtattgagaaattaaaagtggttttatgacagtttcatacaggctaaagtcatcggtaggtgtgatggtacagatgggtgatacttcagtagatatggtacaatcccaaatggcaaagacatggcaggacatttaactaacagagttaagctgttggatggtaacatcaaaataataatcaaattacttactacataagaatgtttggaatgaggaaattgacaagtgtccccagcgccaaaatatatgggtatcccattaagtgtctaattttatagccaaagaaacttcctgagtctgcttattaaaagaccagtcttgagccacacaggttttcacatgcctttaaccaaattccagatctgagtcatttcacagcctcaggatcattccaatgaaaagaaaagcaagtattgaaaacgaaatctataatgatagcactggtatctatgatgaattttcaacctaacatgtctggagagatacctgcagcaattttgcagtttgaatgacaaaacaaaagaagaatagctttatcctttttgaaataaaaagcctgcagtgtgaaggagattcttaatattcatgaagacggaatgacttgctctgaggatatcagtcacctaatatcccttaaaacctcagtgatttctgcggagtttatggacaaacaaaatatccatggtgacaaaaatggaggctatttggcagcttatcaaaagaaacttcacctcactaaggctgctctgatgaccctcagtgttaaatgcagttttcctcaccttgaagtccctaaaatggaaatataacccaaataccagggaccattacacttgactctttttaaaaatcaccatgtgattcacttacctattcattgaatattactaggggtaaacaataattgcatgggttgggatactttagtggaaaataaaagaataaacaacaaataaaaaatatttccttcttgaacttacgttttcatggggagcaaagcaaatataagcagtaactaccacaggaaactatgttatatagtatagtgtaggctgatggatgtgatgaagaaaaaaaaggaaaattgaaaaagaatccagaatgtcaggtttagggaaatagtacggtttccatgcctcattgacatcatatttgaatgaagatttgaaggaaatggatagttcaatgggtaactgggaaaatattggttcaagcacaggaaactttgcccttagccaatgcaatggccttaaagtgggaatatgcatgctaggtatcaacactattagaaggccagtgttgggcgagtgaaggtgacaagacaagaagaacgaaactaggaaaataagtcaaggaggtaaaagaaggaaatatcaaggacttgtactcctatatgcctgaaattttgggtgccaaacatattcagtaagctatgttagtgactatcacagtgtgtccctctgttcttcaaatattagactcactgtcttcttccactttaccccttcacaaaggagaaatcctaaagcctacagctagttataacatctgtctcaagtccaggacctctgtgtggtgtgtagtagttttgttattgcttctagttgcacctgtttgatctgatgactatgaattgaaaggacaagttatgtctgttcaaatatgaactgaaaggacaacttatgcattccaaatatgaattgagaggaaaagttacctattccaaatatcgcagtggaacaatgacaatatagccataatagtcacatttgtaaagagggggataagggacacaggtggtgatgtgctcaagtcagattatactggttcacaatgcccaattgttaatttttttaaaaaaagttgtgtaagttaacatcacaataatagtctgaaattggccacgttggaaatatttacactagagaaatgggtaaacactacaaatcaggattatttttgtcagggaactggttgaacatttatcaataaaccgctaaggtacacaacagtcatttctaaaaattttcaggacaaatgttaggaaggctcttaaacctggaagtgtgaaatgatcctttatcaatctttaattctgcttctggaaattactccttggcagctgagcagatgacagctttctttctagacaaggaaagcaaggggcatgagtggacattttcagtttcaaacaatccaggcttctggttcttttaaaagtacagtttttttttttcaaaaatccatggatattgtactcctttaattccaatacatttgctgtgccagaaacaatatatacaattatttttgagatataaatctcacaactctattttttttcttgctaacccatgtgtctttctccctatttatttccagcttccttgaaccttctatgctttagttagaaagtcacatatctattctcttctccctgaggcattttgtacatttgaaagaatataaattcaagtaggctgtacattcttaacttgatctttgctctgggacactttaatccattcattggctttaaaagtgacagaaagcaggtcagtggttgcctggcagagttgggtgsggggggtaagggtagaggagggatggattacaaaaatcacaagaaaacatttgagggtaatgacaatattgctaatcttctttgtggtaatggtttcttggattgtatacttatgtcaaacctgattttaaagtatacttttaaaatattaggccttcatttttatacacctgaatacatctggaaaaatataagcatgaagtccacaccttaatttgaccttcacacaccagccttttccattttacctttttctagttgtgtgytgggtggaagggtgggaagggaaaattatcacctcctatcattctcatcgcctttatacttattgatgaataaattatttatcttcttaagtcatcagtctccagtcagtgccagtaaccaatacacactattagcattctgctttccaacatctgtaactagagatgcattttattaagtcaaatatattaccactgcctaacgtggggaaccatcctggagatggttgtcagttgcatcttcactatttgcccccaggcttctatgctacagccagatatttcaagaccttgttataacaacgttgcacttctggaagacaatttatttttccatcagcatagtctaagttatgcactgtaacaaataaacctcaacatagccattcttttaaacagcaaatatatatgtcttatgaacattgcccgtagtcagtacaatggccttagagtaaggatttgcctagaagatatcaagacaactaggaagctacgtgttcctacaacatgaattggctggagtccttactatttgtacttactctaaaactgaagttgccaaataaattgctatatggaacactgttggtagctacctttccaggtaagtagtagaggtggctatggtacaagaggaagtgacctggaatgataataggtggtgtttaaagagtaggacaaacattactgaatttgtggaaggtatgcagatattggtaatgagaaggtctagagattggccatgagattgtgagactaatggctggtggagagattgtagaacaaaatcattaagcagaatgtgccaaataacagagaagctaaggccttgtactgataatctatgtgtatattaaaattactgagaattgacattgaaatcaaataggaaagagtaccataaagcagtagttaaaatcattgaaaaatgagataaagtaaattgaagtcattatatccaatattgtccggaaaataagggtagtaagaacagtgatgatagttatccatattttttatctatgatgtgttagcaatataactgtattttaacatatttagtatttatgctaaaataccctcttctccagttttacatttaatgttatggataagttggcacagtagctcatagattaccatatat

SEQ ID NO: 95309 - DNA, 284094 bp, Homo sapiens
ggaaccggggctgcgcgtggcgcttgcgcgccagctggagttccgggtgggcgtgggcttggcgggccccgcactcggagcatccggtctgtcccgccggccccgggcaatgaggggcttagcaccctggccagcggctgcggagggtgtactgggtcccccagcagtgccggcccaccggtgctgcgctcgatttctcgctgggccttagctgccttcccgcggggcagggctcaggacctgcagcccgccatgcctgagcctcccctgctcagtgggctcctataccgcccaagcctccggacgagcgccgccccgtgctccacgcgcccagtcccatcgaccacccaagggctgaggagtgcgggcgaagggcgcagggcgcaggacgcaggactggcaggcagcttcacctgtggccccagtgcgggatccactgggtgaagacagctgggctcctgagtctggtggggacttggagaagctttatgtctaggtaaggattgtaaatacaccaatcggtgctctgtatctagctcaaggtttgtaaacacaccaatcagcaccctgtgtctagctcagggcttgtgaatgcaccaattgacactctgtatctagctactctggtggggacttggagaacctttatgtctagctgaggattgtaaatacaccaattggcactctgtatctagctcaaggtttgtaaacacaccaatcagcacctcgtgtctagctcacggtttgtgaatgcaccaatcaacactccctatctagctaatctagtggggaggtggagaacctctgtgtctagctcagggattgtaaacgcaccaatcagcgccctgtcaaaacagaccacctggctctctgtaaaatggaccaatcagcaggatgtgggtgyggccagatgagagaataaaagcaggctgtgagccagcagtggcaacccattggggtcccttcccacactgtggaagcttcgtttctttgctctttgcaataaatcttgcggctgcttactctttgggtccacactgcctttatgagctgtaacactcactgcgaaggtctgcagcttcactcctgagccagccagaccacgaacccaccagaaggaagaaactctgaacacatccgaatatcagaaggaacaaactccggacacgccacctttaagaactgtaacactcactgcgagggtccacggcttcattcttgaagtcagtgagatcaagaacccaccggttccggacacattataggagagtgatgcgtagagctgtggcagccattttatgaccataaggagacaaacttgaggtcaaaagcacatacgatgagaaaatgaaacaaccatagaccctgggtcctccatcacattttaaaagatagtagggctaacaccgatcactctctttttttctgaaagttctcctttttcttgtcagaagccacattcccctttaacactactccttgttcttaaaagttacttatttggctggtcacagtggctcacacctgtaatcccagcactctgggaggccaaggccagcagatcactaggtcaggaatttgagactagtctggccaacatagtgaaaccccatctttactaaaaatacaaaagattagcagggtgtggtggtgtgcacctgaaatcccagctactcgggaggctgaggcaggagaatcgcgtgaacccaggaggcagaggttgcagtgagccgaggtcacgccattgcactccagcccgggggacagtgctagaccctgtctcaaaaaaaaaaaaagttacttcttttttctttctgctctctgattttctttttcattgctaatgattttcaacgagggggatatgtaattttaaaaggtatatttatatagtctagtttatctttagttggtataaatcatttgccttttaaaaagcatatttagtattattttatccttcagaatctttttaaaaatagctttgagacataattcacataccatacaattcatccatttaaagtgtacaattagtttttagtatatccacagagccatgaaaccataaccacaactaattttagaaaatgtgtaccaagaagaaatcgcatatccacttgcactcactcttcgtttcccctgccctccagccctaggaagctaaaaatctgctttctttctctgtagatttgcatattctgaacattccatatacatggaatcatataatatgtggtcttttgtgagtggtttctttcacttgctatgtttttaaggttcaactgtgatgtagcacattatcagtaactctttggctttgtaatgcaaactattgaaaagcaaacatgtgacatgagactcaaataccaagaaagaaaggtttcaaaatatttattgaggatctcctatttgccaccgttagctagtaaacgcatatggatcattctctaattgttatcttcattcctacatgatctattaggcaccagaattacatttccagctgccatattgacttgggtatccaggagctgacaccttgaacttagttctccctctttcaaggccttctttatttttgctagacagaattcccccaggctcagaagttcaatctttaattcccttttcactttcatatccaatcagtcaccaaatcttataaactctatttctcaaatattttctctgttttggtgtgtcaaaaatgttatgggttgaattgtatttctccacaaaaagatacactgaagtcttaacctaacattacctcagaatatgaccttatttggaaatataataattgcagatataattagttaagatgaggtcatactgaaatagggtgtgtccttcattcaataaggctggtgacctaataaaaagaacactatgtgaagagacagagacacaggaaaatgccatgtcacaatggaggcagagatccaaatgatgcaactataagccaagaaatgccaaagattgctggccatcaccagaagctaggagagaggcatggaataattctccttcagagcccccagaaagaaccaaacctgtggacaccttgatttttagcccctagaactagggtaaggtgacaaatttttgttgcttaaattacctagtgtgtggtacttaatcactacagccctaggtaactaatacagacactaaatgacttcataatagtttaggcattcattatatcatgcatcccaaatctttatttcatcattttatctgctaccccagaccaagccatcatcatttcatgcctaggcaatgttaatcacctcctaattgtctcccttgtctcccacaagaatggcacccctattgccattcttgtatccttataattcatttgccacatagaatattttaataattaaaccatatcatatcagtgttctgctgaaaactctccaatagcatcccttaaatggacattaaagggcctatatgaacgaacagctgcctagctcttgcaccacaattcctgccactcctcattacacaccgggtatgctagattttttttttttttttaaaagaccaattcaattcctccattgcacgaactctgccattctggaatgctcttcctctcatggctcatttcttcttgtcatcacacttcagcttaaatgtcagttctgaacggcctttcttgacgaccggaactaacacagatatttgctcagttttaattctcgacaatgcacttaccactatctgacattgttttgtattattttatgtatttcactggtaattgtgtctcctctccctcctacccccaatagagtatgacaactgggacttgtcttatcatttatccacagtacgtgggaaaatggccggcacatgggacttcaataaatatgtgctcaatggtgaaccacctaggtaggcagatatgtacgctaggatcgtgctcgtggggagcttaggttctaaagggaaaggtcaataaataggagaaaaacaaacacctagattctgttaactgttgcatagaagagattgaagttatacagaagacactgaggagtctataatcagaagtttctcaggtatgaggtgacatttttgctgaggctggaatgaaggcttggaaaaaattaagcaagtagagctcagctccctgaaaatttccaacagagagaacagcaagcaaataatcttagaggctattatacaacaaattcactgagttccaggaaagtcagtgtgactagagcatagtaaaactggaaaatgatgagaaaagtggctggaaaggtagtcagggtccagattatacaagccttgttagagaatgataagctgtttctattttaccctaagtgaaatactatgctatttaagttgctaaatgacatcgtctgatttactcagtgtagagtctcaccaaactgtgtccccaaccaccagcatcagaatcacttctgagcttgttaaaaatgcaatctgaagcaccacatcggaactgaattaagatccctaggtgattcatatgcacattaaagtgtgagaaacactggtacagagaatggagtagaggtgagaaagagtagaagaggggaagtcagttagagagctacattctggtccaagtgaaggaaaacagtggcctgcataagagtgacagcaggaaggatgagaagacggattctaggtcacgttttgcagacagtttgtttaggtctcctagccagctaaatggaaatctcagtagacaggcagtgatacaagcctgggtttctgaaaaaagtttaggcttggagatgtagatctgtgggtctgttattaatagttgtcctgcttcgggtttttatttttttttaattttcttccttttttagtgctttatattttacaaatgtctgcagcagttttttgtcatctttatggaaaacaaggcacgtcttaaagtcgttcaagtccttcactttttcacactgaggtctgtcttcatatccacttatctttcaagtctatgaaaccccttataaaaactttcctttgaaatattttaaaattcaaggcccaaggctgattaatactgtttctcctccataacccctaggatcctccagttctgggttttaacgagaaaaatatcctcaatcctctctagtttctaggtgtaaagcagcttggaccctcctgggtttggtgggtccatctctcttggagtccaactctgtattcctaaaaagcaattattgaaatagaagctagtcagttaatggcaataaaagaagggaattccaagtgggagcttcccaagccaagaggaagagaggtttcttgccttatcactgtaagtggcagagtggagttccaattcaatgatatcatttgtgttatcaaaggtagtttaatcgttgaaaagcttgttaacaattataaacacaggcaaatgccttttcctttttggccttacggagaatgagaaaagttcttcccatggctaaaattcttagctgttggtaatgcagaaaagagtaccagaacagcagaattccaacggtattccaggattctgtgtcttggttaattttaaattcacgtgacctggcaaacttaggagagtcctggttgtaagaggtattaacattttcagcagtagtactctagctacacttgactgttcccctctctgtgaatttacatgatatgtttgaaatactgcccctcaaaagtctcagaactttgagaaatacggtcctttccaaaaaaaccccttatgtccaatttgaaggggtcgctgtcagtgggtgcttaagtgggtaaagaaaagccaagaatatgtcagggtgaggaaggccaaggctgagcgaggtcagcttgggacccacctcctagaatgacctccgccagcaggaaaaaaccgttaaggggaggaaagggcaggtccctgcggcctccaggtgccagccgcgtgagtgggcggagaggcctcggtgcctcctacccgctccggacgtgcgtcccggcatcaccccgggatccgctcctccccgctggcggggggagaaagggcaggaggccttccgtcccggctataaagggccccggaccgccgcggctcgcctcggcttgcctcgacacgcctaggcgcyctccggctccgccctagccgccgcgtcccagctagagctccagcrcccgctcaggccccactcgacctctcgggcctcggctacttggactgcggcggaatatggcggctccgatgactcccgcggctcggcccgaggactacgaggcggcgctcaatgccgccctggctgacgtgcccgaactggccagactcctggagatcgacccgtacttgaagmcctacgccgtggacttccagcgcaggtaccgccgkaatcccaccaccccyacttagacaggcagcccgcctcccaggagccgtctcgggacacgggccgcccctcggccctcgcgcgccaaccccgccccaggcggggaggaacctgagtgggcggggctcggggtgactcgggtaaccgggttctgtggcttccgtagtggcaggtttgacagcgctggtgcccggagcgggcgctgaagaaacttctttcctcatcccctttcccctctgttctaatcagcggtcttgcgccatagggtacgtgctgtggctccaacacttattccccagagtgctgctggggagtgactcaccgccgctgcaggttttctgactttggcacccactagcgtgggcctgtggagtaacgtgggcataactcctggcacgtgtaattacgcatttaaaactttctagtttatttcatagcaaatgttgtgattttatatctaagaggattccttcaggcagacactatatccttttgttttttccttgctaatattcctcatttaggggaagattacacctacattgatcaattttttctccccttggatcaacattgagaagttaaatgtacatcaacatttgtccgtgtgtgactttaaccatcttgaagagggagaaaggtcaggaaagcaacttttacaggccaatgtcgttttagcttgtcttctaccattgtgtaccatacaactttagttactgggctaataattctattcataagttccactaaaaaggtacaggtctttttctgttgtcgttgttgtttgaagtaaaagagctattatacaagttgtaatagttatacttgtgaggttaccccattttgatttaatagtttctccccttttaggagagacactgcagaatggaaactatcctggcaacagaatatacatggccaatttttcgagtgatggaaaacatccaactagttaactggcatgaaggagcgttgagagtaatgaaaatgggttgatttggagtttgaaaaaagcccagcaaattgtttgtgtcctagcattttcaggtattaaatgcattcaaatcagcaagtgtttattgaggaactcctataaataaaacactgctctagggattgtaagggatgtgaagtttcattcttgagcttgtatatagtagtgaatgaggcctctgtaaaataatcaccttgagctgtccctcrcttaatcagatgattatgctcttatataaaccatatgaggagcagccttgtgaaattgttttcagaatttacagtatatgctttcagagaaacttagtgcataaycgtcataggtttaaggttggatttgatttagaaatagtcagaaaaaatttagaacaaaagatagtgattaaaggtagtggttagattttttttttgatgtccttgtaaccatgacattaatttacctgtgtgctttgtaaaaggacacttaagatatttattaaagaagagttgtggaaatgttttatctacacccccttccttttttttttaaatgacacaaacagattaacattctttattaagtgtttctttcatgtactttatttccaactccactgggattgaagcatttataatcttctttcatggtttgccaaaactaatgaagggaacaaaggccaagataaagaagggaagagaatccagtgtgcttggtgaaaagtctcgtccagtgggccctcatgcctcactctgacccggattttacttttgtccttggttctgagtaatggccatttgctagcatacatgttccatttaggcatatcaaatagtaatttggcatttgttagtggtaacttctattgttaacacttgaagaataaaacatttttccttcatacaatctggtcttagttccttgtccaattttccatttatttctkataatccatttggactgtgtgtctttggcctaacacaaatacataaccagtcaaacacttaggtgcaaagtatgcttactaaggagtgaagaaaatttgaggtacaaacaacagtatataattaaggtgatgaagaaggaaatttctctttgatggactgtctcatccttccccaacagatatcttttgatttgaaattttttggatgttcccttaggatgttttggatgttccttcccttctttaccttggccttttccccttctgtattagtccgttttcatgctgctgataaagacatacctgagactgggcaatttacaaaaggaagaggtttattggacttacagttccaagtggctgaggatgcctcgcaatcatggcagaaggtgaaagtcatgtctcacatggtggcagacaagagaagagagcttgtgcagggaaactcccctttttaaaaccatcaggtctcgtgagacttacttactatcaggagaacagcgtgggaaagacctgcccccatgattcagttacctcccatcaggtccctcccacaacacgtgggaattcaagatgagatctgagtggggacacaaccaaaccatatcaccttcattagttgttcttttcaccttctgtacctgtgagaattttgaatcaagtgtagaggattaatgagttactctgctataaaataaaaattagtacattattagcatgactgaccacctccatgttgtctcattgatgacctcccaaaatagcattttccacttgatttttctaccttttatttagttatttacttgttgttacactacaattagttgttataattccaaaatcttagtgctttaaaacaacatttaattgttcccatattacatgtcagcatgagtcagccagagggccctcctcatggcagtcactcaaaaatctaggcttatgaaggatttgttttgaaacatgcttctgtagaggtggtcacagtgcaaagagaagcatgttgaactatgcactatttcttacagcttttgcctagcagtgagtccattctgctgatacgttacattggccagtgcccatcagcttgccatgtgggtgaaacagagaattggcatttgtgaacattgtcaaaacaacacaatttaataatactactttataccctctgtttaatgtttataaagtactttcagatccggtatttaatgtaatcctcataacaaaaccatgaggtagacagacggtgggcatttttcctgttttgcagatgaagaaactaagtgatgggcttgagcatatatggcataagtaagtgctgcaactgtgattaatctttctttactgaaactgttctcaaccagttcacagacaacttcatgataatttagggatccctcttttctttatctctagcattgtacatgttggactatttcttggctctttgaagccataatcttgcttttctttcattttctcagcctctttttgaccatttaatgtaagagattttcaaggttcttccctgggatcatttatgtatttctattgtatattttctccctagacattctcatccatcccatggattccatctatctactgaggctgcccacatctgtctccactctagatctttctccttatcttggacttatttatatcttcattttgatgttttataaatacaaatctcaacatgtataaaactgaacttaacagattttcattccaaacatgtttgtccctgtcaacccaatcgcagtgtctggaatcttcctctaccagctgctcaaacctaaaaggtaacgagtgatttctaattactcccgtctcctcctagacctttgagtctagtcaattgtagcccctaacttttaagtatgtagcatgctgccttcctactgctgccatcctagttcaggttgctagcatctctagtatggtttacagaaacaacctcatagctrttgttcttttttcaaatcttcactccattctaacttctccactcctcttcattccaaacagagtaagtagaatggattttgaaataaacaaatctgatcatggtactcctctgcttaaaccctttcaaccattcctcatttctcttgagttctgtacagcctccttcccataacttagaagattctgcattatctggtccctgttgaccttttcagcctccctctcggtaccatctaaccagagggccataaagggagagggcagcttggatctctggggaccattctgtaaaggtaccagaataccagtaaaataaattagaaacatgatatccatttcccacatgcattccttttttcttgaatattgaagattttcatttcttattttgtccacacacaagaaattggggcatctggaaaaatcactgaataaaagataagaaagatgaagaattagaaaaattttctaatctttatcagaagagtgacagatttagcttagtaggagtgggttaaataagtgaatcttttcctgtatttaatattttcttaatataaaacaatttctctaccccatgaaagagaaacatttaacaaatgtttgagtatcagctggaaagtgtgacatcatattatcctgtcttggatgccacatgttttggtttagccctcagtgaagctgtgcttttgtacatgctattgcttctgcctaagcattctttgcttctaccttaggatagttcctatacatgttttgggacacagcttagagatatattatatgccttctctgacttcgccctgtctcaaagcttcttctgggctggttgaggggtccctcttcttttctgccaccttggaccactatcctatgcatgctcatccactgtaatacagttgtctttctactctttgtatcccccactagattgtttgctctcataagtgggtactatgtctatattatttattcactgttgtattcctcagtctgtagaactggacctgcctcacagtaaatacttagtgtaatacttgaatgagccagtggctgagtgaatatcttctgacttcatttttcctttgtgccataccagtgagtctayggtcaattcacctggagctaaaaatgtctggattactagggtagatgaacagggaacaggagtagttactagaggtttcatgtgacaatctgggtaaggggaatatatgctcaattaaagagctaaagatgaccagaataaatcaagaaaatagcttcttaattagatactttcatactcatcagagactaaaagtttgatctctgaaggaatagtcagtttgagagaatctgatgtcaagttgtagctgtgtgtccaagaatgggagaaggggttttatgataaatattatatgttaagtattacaattacagtgaagagctctacttggttagaaataaaataattttcacattggtatctattaaaattagaaagtaatttggatttggtacgttagcaaccactccaagaaattaaaaaaaaattgtattgaggtaaaatgtacrtatataattcaccatttttaccatttttaaccacagttcagtggtaataaataaatttatatatattttcctcctttatcttccttccccactgtccttcccagcctctggtaacctccaatctactttctgtcttcctgagaaacacttttttagcttctgcatatgagtgagagcatgtgatatttgcctttctgtacttggcttatctcacttaacataatggtctccagttccatccatgttgctgcaatgataggatttcattaatttttatggttgaataatattccattgtgtatatatactgtagtttctttatccattcatccgttgataagcacttaggttaattccatattttagctattgtgaatagggctgcaataaacatgggagtgcagatatcttttcaacatactgattttatttcttttggatatatacccagtagtagcattggtggattatatcatagtcatatattaacttatttgaggaacttctatactgtttttttttccaagtggctatggtaatttacattcccaccaacagtgtatgagtgttccctttctgcacatcctaaccagcatctgttactgcccatgtttttgatacaagctattttaactgtagtgagatgatattgcattgtggttttgatttgcatttctgtgatgattagtgatattgagcatttttttcatacacctgtcggccatttatatgttttcttttgagaaatgtctgttcagatctttcgcccattttaaagtcagatttttttgctatctgattatttgagttctttgtacattatggttattaatctcttatctgatagtttgcagatattttctcctattctatgggttgtctgtttactttgttgattgtttcctttgctgtgcagaagctttttagcttgatttatactctgatgtctatttttgctttgatagcctatgttaaggtcttacacaagaaatctttatgtgagagaccagtgccctggagcattttcccagtgttttctgctacaattttcatagtttcaggtcttagactaaagtttttaatccatttgatttgatttttgtgtatgatgagatattaggggtctagtttcattcttcatcatatagttatccagttttcccagcaccatttattgaatagactgtcctttccccattttaagttcttggcacctttgttgaagatgagttggtggcaaatgtgtgtatttagatctgagttctccattctgttccattagtctatgtgtctgtttttatgccagtaccatgctgttttggtttctatagctttgtaatacattttaaagccaggtagtatgatgcctccagcttttttctttcttcctttttttttttttgctaagatttatttgrctatttggggtcttttgtggtttcatttaaactttaggatttatttttatatttctgtgaagaatatgataatcagcgttttgatagggattgcattgagtctgtaattgcttggctagtattgtcattttaacaatattaatccttctaatccgtaaacatggaataccttcccattttttggtgtcctcttgtatttctttcatcagagttttattgttttccttgtatagatctttcacttctttggttatattgattcctaggtattttgtattcgttgtaggtattgtaaatgggattgctttctggatttatctttcagatggttctctgttggcatatataaatcatacwgatttttatatttcgattttgtattctgcaacttcactgaatttgtttaccacttctaacagcttttgggtggagtctttatgtttttgtaggtatataatcatgttgtctgcaaacaaggctaatttggcttcttcctttacagttttgatgccctttagctgtatctcttgcctaattgctctggccaaccacaccaaaaattggttcccacagcgcagaagttttatatcacagtggaatggggtacttttttctcagtgcctggccaagttgtgggctctgaaggaagtcagatgtcagtgactgtagaaggcagtgaagaatctgaagatgacaagatgtacatgacctgctcttctgcactactagattcatttgccctttgcagctgagatctttactaactccagtcattcctgaattctctacagtgatggtcaacaggctctgacctcttctcattttcaaagtgccttcaaatgacttcrtggagcatcttggtttagtttaggctctggcacctgctgcaccacctcctgagaaatgactgtgtgtgttgtaacttacagkattcctttcagctctcatcaaactgggccttggtcagctagtgaggtgataatattgtctctgtgaaatatgctatagttttagactgataagtatatcatactgctgttatttgaaagcacatattaaactttgattatacatttataggtattaaaggaaaatatgaaagtgtattctttggagaaaattgctactaccaggtacctttcattgtaaagtgagctgattttcttcttatggcaatatgagctcatcagtttatgttcaccactgttttgaatccagggctcctttgtgtktaatatccagaagaatccccattgtgttttgtgtttagggcaacaggaacccggtaccttgacaaaaggtaagactctatgttaaacacatgattatgtrgagttttaaaatatgttatacatcttacattcattgatttattatacaattaaattttagctcttataactattaaatagctttgagtcctagggaaaattaatcaacctctgtgaacttatttyttcatccataaaagttggatagaatccactttgtagggtgtcttgaggactaagaatacatgtgaagatgctcagtaaacaaataatagtttgatgataatattattagcaaactaatatatcaagttaaatatttactaggatattactttcagaagattttactgtttgcttctttaacactgtattctgaaatcaatcatcagataaataccatgaccagaaattccccacaactctttgttttgctagttaactgtgccttactttagggggttccttctttttttttgttagtaggagtgattgtgtgaatgaggtgaggcaggtggtaattttaatcataatctaatagagaaggaaaggaatatgtttaaactttgatccttaatttagagaggaaatgataaagaaattgccagtttactataagctgaaggcaagatgagtcctgggatataatgagcacaaagctccttttattgagagaggtaaatgctagcctgcagaaattcaaaatcactgttctcttgatcttccttttctgtctttttcttttctttcatctgactgctaagtgttcatattcttgggcatcaaacagctgcagggattttcttcctcctgaactgtagatggttagaggaatggtcatactgagtttactaatagcaggagtaactttgaaaataagactaatgtagaagaagaaaaaatatataatagcagcataaaagtttgaaaatgaaataattattctagtggagtctgaacatatgatatgtgcatattaattagaaaaagttataaatccaatattctgccttctcttttttttcctctcttgctttttgatatttgatggctgcagttattttcaatgggtttgattttgccataagatgcataaaacaaatgaatagaatattcatatgtattttagtagatccattgaatgattaattttaatgagacacaatctctgggtttatacactagttctacaacccaaaatatgataatcagaaaccaaatatacaaatgtatttcttgcataaagttgaagttttccaaatacccagcaaaaagaattaactgtttgttttaccggtgatatcacatgatactcagtgtcatcaatctgttttcatttccattaataacacctagccacaggttatatttaattatgaataactgcacaatacagatatacacaccagtacagaaacatgataaaattggttatgcatttaggttcatgtcatagaaaacccagcacactttcaattaacagaatatcccacaagcaatgaattatagaaatagaggcttgtgaagaaaagcgaaggtcagtggtttgggctttagcttaaatacatccttctttatcttctgctatattatccttagcatatggtctcctttcttatgcttagaggttgattgggcacagcttggcaccacatccatgtttctagmtggaacacgtgctagcttactatgtcttttttagtgaagcatrtgttagctttcttgtaaacttcaactggttcttcccatttacaggttattgatcagaattgtcccatggtcatccttagctgaaagtgagcctggatcatcaaggctttcagtggcacacacatcttcctgaaatgtatccttttgtctcatccatcacaacttcccagggctcttttcctttctccaaagaggaaactacatctggcagaagatgaaaagcccagtgagatcatgctgtagtcctctaaaatcacatctatgcacaaatcattctgtgcaggatccaggcattctactgttcctgagaggagtctatagtaacacccctcagtattaccagccgctggttatggattttactttgctagacctgatctttgtttttctgggttctttttttttggcggagggccgggggtatacagagacttttcactgctctgtcttaaggtgattcagtcacttcagctacttggccctagctccactatcttctttttttaatttcatgaatattcttagaaaatataagaatgttgccaggygcagtggctgacgcctgtaatcccagcacttttggaggctgaggtgggcagatcacgaggtcaggagtttgagatcagcctggccaatatggtgaaacctgcctctactaaaaatacaaaaattagccgggcgtggtggcacgcacctatagtcccagctacttaggaggctgaggaagaagaatcgcttggaccggggaggaggaggttgcagtgagccaagatcgcgccactgtattccagcctgggygacagagccaaaaaaaaaaaaatacatatatatatatatatatatatatacgtatatatatatatatatatatatatacacacacacacatatatatatatacgtatatatatatacatacatatatatacatatatatatacatatatatatacatatatatatacatatatatatacatatatatacatatatatatatacacctatatatatacatatatatatacatatatatatacatatatatatacatatatatatgaatgttttgagatgaaattggtttcttaattactaataattttttcatcttatcttgggctcatgaaaaaatggtcagttttcagttatttggagaatagaaaatttgtgtgattaaaaagaaaaggagaacaaaattaaaaatgtccattaatttatgctaagtctttaaagcatgaattatttttttacgtaactacacacaagcttatgaggctttaacattgtacctttccgtgctgttctttttaaagcttaagatgtgtaactatcagtcttcatggttgtcatttttgtgctttttattattattttgtctcagcttttctctttctgcattaaaatactctgacacttttgtttacctgtttgctttttgcctacaccttggagtcttccatcctcttgaccattttgattggcagtgttatttttgtggtttaagttgtgcttactagtaataggagtgtagtgaaactaacaggcttctttttgctttacttctccaaagtgcctttaattaaaaactgtatggtacccatgcagtattaggcaaacctctactcacaaatacarcatataaacaagaagtacatagaaataagagtagtatcaaacctaagggttggttttagcaggttccaagtacctataaagtcagaggacatttgaaaacatagtggagattgtttagacaattgtaaattgtgttagaccgtattaaaaaaaatcattctgaaataattacagactcacagaaagttgcaaacagagtttagagaaggctcctctacccttcactaagtttgctgcagtggtaatatcttgcataactgcagtggttgtatcaaaaccaggagattgacattggtgcaaactacagaccttatttacatttctccagtttttacatatacttatttgtgtgtgtctacacttctatacaattttatcacatgtgtatattaatgtaactgacactgcaatgaagatatagaactgttacatcactacgaaggaatgctctcctgctattcctttatactcacattgcccctcccccacccatccctaacttttggcaaccagtgagttatatggtttgcatgtctgtaatgtttttcatttggggagtgttctatgaatgaaatcatatatcagtttttgacagtggcttttttggcctttttttttcattcagcataattcccttgagatctctccacgttgcatatatcaatagtttgttcctttttgtcacttagtggtattccattgtatggatgtaccatccatccagtttgtttattaacctgttgaaggacatttggattgttcccagtttttggctattacaaatattacagtaaacctaagatatgaatatttatgtataggttttatttctctgagataaatgcacagaatgctgtgatagctgggtcacgtggcaagcatttgttttataaggaatttccagatattttctttttttcttttttcttttttttttttttttgagacagagtcttgctctgtcaccaggctggagtgcagtggtaccgtcttggctcactgcaacctctgcctccctggttcaagcgattctcctgcctcagcctccctggtagctggcactacaggtgcgcaccaccatgcccagctaatttttgtatttttagtagagacggggtttcaccatgttggccaggatggtctcgatctcttgacctcatgatccacccacctctgcctcccaaagtgttggaattacaggctgagccactgcgcccggcctccagatattttctacagtatctgtacaagtttgcattccactggatgcagttgatctgcatccttgccaacatttggtattatcattaatttttgttgttgttgttgttttttgagacagagtctccttgctctatcacccaggctggagtgcagtggcgcggtctcggctcactgcaagctccgcctcccgggttcacgccattctcctgccccagtctcccgagtagctgggactacaggcgcccgccaccacacccggctaattttttgtatttttagtagagacggggtttcacagtgttagccaggatggtttcaatctcttgacctggtgatccgccctcctcggccttccaaagtgctgtaattataggcgtgagccaccgcacccggccttcactattttttatgttaactaataggtatatagtgctatgtcattgtggttttaatttgcatttttctaatgcctaattacatttaaagatcttttaaagtattattttctatttgtacgttttctttggtgaaatgtttattcatgtcttttgcccattttctaactggattgatttttcttttttcacttgccggtttttgttttttgagatgagtcttgccctgttgtccaggctggagtgcagtggcgtgatctcggctcactgcaacctctgcctccccatttgaaatgattctcctgcttcaacctccctagtagctgggattacaggtgcgtgctttcatgcgcgtccgtgtgaagagaccaccaaacaggctttgtgtgagcaataaagctgtttatttcacctgggtgcaggcgggctgagtccgaaaagagagtcagcgaagggagataagggtggggccgttttataggatttgggaaggtaatggaaaattacagtcaaagggggttgttctctggtgggcaggggcgggggtcacaaggtgctcagtgggggagcttctgagccaggagaaggaaattcaaagggttaatcactcagttaaggtgggccaggaacaaatcacaatggtggaatgtcatcagctaaggcggggcagggccttttcacttcttttgtgattcttcagttacttcaggccatctgggcgtatacgtgcaagtcacaggggatgtgatggcttggcttgggctcagagacctgacatgtgccaccactctcagctgatttttgtattttgagtagagatggggtttcaccatgttggctagtgtggtctccaactcctgacctcaaatgaccagcctgcctcagactccgaaagtgctgggatgacaggcttgagttactgagcttggcctatttttgtgttttgagagttcattatatgttctacacataaatcctttgttagatttgtggtttacacatattttctttctgtctgtggcttgtctttctatcttctaaacagagtctttcacagagcaaaatttttaaattttagtgaagttaaaaatttcaattttttcatttattttgatgaatcatgcttttgttgccatatctaagagctcttttcctagctctaggacctgaacattttctctatttttttttctaaaagttttgttgttttacatattacatttaagtctgtgatccattgtgcattaattttttgtgtaatgttttaggtttaagtccaggtttattttattgcttatgtgtgtttgcttccttttaatgatcataaactgacaaacttgtattgagaagcgacctgaccaaaattaccctcatctttaatcaggtgtcactgaaaggtacaagcaatgaaaatttttacacatattataggttatcgaaagcatggaaacaaactgtcagttttcttatttatgagatctcattttaagctttgacaaaccctaaactttaggaagccaggcaaaaatttgtgatatatatgggaatttattctcaagtaggtgcctcatgttaaggttttttcttttcagtttttgattttcatatttttctgtcgtgtcacattattgatttatattccaaatatttcttcatatgaatctgtatgaatgtatatgttcatgtatactgcataactgtagtggttatcattttaatttgacttatcattttaatttgattttttatttttaaaaatttcatttcttggccagatgtggtagctaatgtttgtaatcccagtactttgggaggctgaggtggttggactgaatgagcccaggagttttgagaccagcctgggcaatacagtgagatcccatctgtccaaaaataaaaattagccaggtatggtggcgagcacctgtagtcctagctacttgggaggctgaggtgtgaggattgcttgagcctgggaagtcaatgctgcagtgagctaagattgtgccactgcactccccctgggtaacagagcaagaccctgtctcagaaaaaaaaacttaaaacgttttatattttagtctcagaaccctctcatttcacagtatcagtcttcacttctacattatgaaaacgattgcctttatttatatacattgaagtacagagaaaaaacaaacacctattactttaaaaataagtttcattcattttgtctgtttatttgacttaaatgacaagtaaatctaatattttgtgttataattttatttgtaagaatgaattggttaaatcttaactaatgtcagtattttacaaaattagtttcttttatctaaatgaaattagcctttagtttattccaatattaatattttctttgatatttatcagggttcattatcttataaatatattagaaatcatagcatgccactttccaaatagaaattgattagttgttgagagatggaagttgtttgtacgtttatttggcaaaatttagaaaatttatgaataatatagctaaaaatttatctgcctttaaacagaaaggtaaagtggagtaatttttccactattcaacctaatgtattcaaattatcatttcaacatgtaacttaaaagattactgatgagwtattttacctgtcatttgtgctaagtttttgaggaaatatttattctacaattgtaactcattataatgaatttgaagcactaaacatccaaaagtgatctctaccaagtttactgataataataataatcatcaccatcattacaataattattattgttataatttacatatacatcattttatgtgcattggggtcagagtctgccttcctaagaagtttccaggtgatgctgatgctgctgtttcccagaggatactttcagtagtaggtagtcccatacctctgttcaaaatggagttagcaaagggctaaattttgttctgtaaatatgtaagctataagtatgtatttcaaatttttaaaaataagtaatacatgtatatactgatgaggttaaccaagttacttaattttttggtggtcacagtaagttttctaactcttattataggtaaaaagggttttattgttaatattatcaaagttgctttttcttacatctgtactatgagttttactgttgcagatttgtaagaagtttattcctaacactctctttggcacaggcacttttctatatgatagcagaacaaatatgagtaagataggcgtcctacctgacaggagctcagttaggcaaataaacacagagtagatatttaatcacaaagttcagtgtaatacagatgaaagcatatcttcttctattaaggaaggggataatacatatatgacaaagaagttcttttgaattgctttaagttctcaaaattatttctctattaaaattagaatgagtctttaagaatgtggaagtctgtgggttttgtggaaataaataatgtaagagctaagacattaatcttcattaaaacatttaatgaaggtatcatttgaacttttatacagctttggttacagtgaaagtttacttgcaaaattggttcagttggaaaatgtgcttgtgtaagaattgccacattgtgtgagcactgaagcctctaaaatagcttgcaaatcatatctgaaaacacagcaacatgtttctttataacagataagcccattttggaagggatagtgggctgtttttaatgggaatgaggcaattcctgagtaagctaagtggctgcattcctgagtgagtcaagggacattatgagtgttatctggagaggtttccagaaaagcaaatgagtactgaatgctcatgctcctcctgattccatgttaggtgtcctgcccagaccaatgttatccaatagaaatgtaatataaatcacacaggtaatttaaacttttctagtagccacattaaaaaaggtagaaagaaaactaatttttacactattcaacctaatgtattcaaagtatcatttcaacatgtaacttaaaagagtactgatgagatattttacctgtcgtttgtactaagtctttgaaatctgatgtgtattttacacttatagcacatctcagttgggactagtcatatttcaagtgcttaataataatgtttggctggtggctaccatattagacagtgcaggtgggtatttgaaataacagcttttggaaaaagttggtatcactccacaaagagattcaaggggaagattaaggagggagaatggttcagtcagccctgtgttcataacagaggtaattagacccaaagaaattctgacttagcctaagatagggactctgcaattattgaccagtgacttttttatatttgaagataaataartagatgatatgttaagtgtaaacatggagatatgccacatacttaacagtggctaagtaggtggtcatgtttgccctaagttacttggcatggctagtccacgttgaccttttcattgaggtaattcttattcatgtctttttttaatgctaaatgcatcatgtccgtcctataaagcaaaaacacaaacaacacaaaacaaaaacatgggccagacaaagtaaatctggtctttcttgataaaatgactgagatcaggtgactgctgtctgctttaatagccctagacctttctggatgttccaatttcacttggattcggcccagattaacagctgtttctaacttcgttgtyccatgaatcttgctaaagtgaggtgactcattatgacttgcattatttttgagttggtctttgcctgtaagagaggggggttggaaagattgattctctgttaaaacttaaaactagtgataatattgtgggggtgtrtgtgtgttcatgattgtgtgtgtgccttgtgtctttttatattcttttcttcatgacttgcttttcttgttttctctagatggtagtttcttcagtgttcatactttttatttatatttgcatatataactttaaataatagttaacctcatactcataatgaaaacattgccatttttagaagtatttgccttcatgagcaatcagtcacattcttccagtggaatgttgttttcctgctctcatccatgttgtgttttccacactatgctgtttagtacgtgctgactcactgagcatctttgggatgctggctgtgtgttttgaatttaagaagagaagaatatagttaggggacacattattgtcttttggtattttctatagaatttagaatagagatttgtactcaggggtgttttgcaaatgtgtattgactaggggtctggtctagcttgttctgtaatattaggaatctakaaatatttattactgtcgttgttggagggtccctagaaacagttgggagtaattcttttatcatgtagtggcctgtggtgggcaaaacctctctcacataccgcttaacctttctcgtgtctaatactactcatgaagaagattgtaatttgtgcattgtgcttttatcaggttgctgttcccaatgcagttagtgtaatttttcatttcctaacagtcctcgggcaattctgtttaacatgctttctatttcagaacattctcctatttaaaaaacttctttcgcctcaggcccaacatgattttccagccaggccagtagtaatttctatcattcctggcttcattcaccttcactgttaaaattcgatgtggatttcctaagaaggtttcctttttgtgtttatggcatagcaaatgatggggcgcctatgccttctytgatattatttggttcacaaaaatattatttcatttttattactaaggggaagacatgcatgcccagttttcatatttatttcaaatctgtttcagttatttatgtcataaaccatccttttttaatgaatagaattttaattgtccacctgaacttttaaagttgttcatagcattttcctgaacagcagtattcacactagaataagagactgatttgctgatttttttataacgttcaagttcatttagtaggtagcaaattctctttttaaagtgctattttaaaagtgaatgaaacaggttatcttcctttccatcccaaatgaatatgaattaggtataatttttggcttgagaggagatagcattttaagtagaggctctcgaagctactctttgggtctgaaattggctataatgacataatctagaaggatttaggtttttaatggggggaagtctggcaaacagaaacatgcaagagaaaccctttgctgtcttattttaaggcactactggtttacattgaggtaggttttgaaatatctttttatagtatcaagattttcaagagattctagggaatatagatggggaggtggagggctaaactaaaattagarctctagttataatatatattatatattatatataaaaaactatatattatatataatctatataatatgtataatactctatattatgtagagtataatactctatatattatgtagagtgttatatattatatagagtattatactttttatatatcatacatgttatatgtgtgtatatttgtgttgtatacacaccacatatacatagaacttgtgtgatgtatgcatggcttttatattatgccttgtattagttggaatgttttcccattaattatgctgatttctgtgtacaaacatgggagaaaatggggcttttcctctctttggggatactcatcataacattaaggagaaaggaagagtacttcttttttaggttatagtttgcattttagatttcattgctgttcctctcgacttccatctgtgttgacatttgggaattttgtggttgctctttctcaagtggagtggaaatgcttaaaacagaatttacacttttaaatacaaccaaggctctattgcattgtgattcactccaggtctgaatactttttctttggcttaaaaaaaaatcaaatggtttgttgaactaaatatttctcaagcttgcaaacttactgattattatacattattaacaaccacttttgcattaatggaaagatctggctgaaaatacaatgataaatattaaggttttagacacttaatattttatggcatcaaagatgtttttatatagacgktattgttaattgttatttgttaatgacattgtggtttaattttattttggtttttagttaaggctcaattataacccaggaaatactaaaaatttgaataagccataaatagccagatttggtgctgtatgacttatgttggctctgtgctctattttttcttaaccttttaaatccctgtcagttggcattttctgtacgggtgtgtatgagagagagattttggggctgaataattagtggtctggacctcagttcagttactgagagggtgaattccctaagactccttttagcttttaatgtttgtgatggattcttttagacaaaatttgattttaaataaattgtgtgtgtgtgtgtgtgtgtgtgggcactttctaacactcttaggcagtacagtgggagtttgttgtaatttccagattcagccactaaacaggtgatccggaggcactattcttagcagtttgtrtagttggagaaagacagcaaaatcttataatggctttaagtatttcatactcctcattttcaattctgggccttattgactggcctttgctggttattgtagccatttccctcaggtttagttctcttctccgtactgcgtttatgagaaaaataataattagaagttaagtggtctccaacatgagaccatgtaattcatgattatttgttttttgttttgttttgttttggcttttcttaaaggccagctttacatatgggtagataccagcttaaaaaaaaaagagagagatcctctatgtatagctgaaaatcttattttcttggtgctaagacaaaattcaggtgtgaattagacaaaagtggaaaagaatagattaaataataaataaccaatacactgtaatatgtattggttaatctattattattattatttgagaaagggtttcattctgttgcccaggctggagtgcagtggcaagatcatagctcattgcagccttgaactcctaggctcaatcaatcctcctgcctcagcctcctgagtggctgggactacaggcatatgccactgctcctggctgatttttaaattttttgtagagatggggtcttgctatgctgctcaggctggtcttgaactcctgggctcaggtgattctcctgccttggccttccaaattgctgggattacaggtgtgatcatcacacctggcccgatttttatttttaattgtttattatggactttggaaaggaattgtagaaacttaatcaaaggcatgtgtaatttatttaatgtttggatatgtgtttttggttaaaaaatgtaagaaaattagcagaaatactttctaaaggaatagaatatatgtcaattttcaaaggatgataagccaaggtaaaattggcttaaccagttttggaagcctcatggaaaaactcaagtcagtaatgaaacctctcaataaaaaaaggtaactagagaatccrtgaccacattattgtgttacctaagctgatgaacagggtaagatattttatttttctattaaggaaagatcaattcctaggtcccagtgctcttgagacaggcgttaactcactcaatatttgccaggcaatatgttgtcttctagaaagtgcacccctgtcttttgttcttgagtaatttactggctagttggaggtaataggaataatccagtgataaattgtagtatataaaatttacctggtaactaagatgttatacactcaaatttctgggtctggatatcacacagttagaagttttaatgagtttcacatgaaatattttgctttacatatataaaatcactgctgggtaggctgacagtgtatcctgcagtggttaaaagctgagacttgggtcagctggcctgagttcaaatcctagctccctaactatttgctatgtgctgcagtctgaatgtttgtattccctctgccgaaatttatatattggaatcctaacccccaagatgataatattaagagacagggcctttgagcggtgtttagatcctgagggttctaccctcattaatgggattagtacctttataagagaggcacgaagaagctcatttaccttttccaccacatgaagaagcaacaacaaggcaccaactatgaaactatgagagatccctcaccaggcatggaacctgctggcaccttgatcttggactaaccagcttccagaactatgagcaatacatttcttttgtttataaactacccagtctaaggtattttgttatagcagcctgaatggactgacactatgggtaatttaactttcctaacccttaattttgtaatctataacatgaggataataataccagctttatcaacattttatgaggattaaataatgggataatccatgtaaagactggctggcaagaagtacgtgctctgtaaatattattaattgtgattargagatacggaaaataaaatgacccaaggaattacattccagggtatggaatttttttagaatttttctttagatttatttctgcaagtaattacattcattacaatagctttaagtcagtgccttccaacctgtgaagagtctttttttttaaaaaaaaaacacacattttttgctcaccatcactggccatcagagaaatgcaaatcaaaaccacaatgagataccatctcacgcctgttagaatggcagtcattaaaaagtcaggaaacaacaggtgctggagaggatgtggagaaataggaacacttttacactgttggtgggactgtaaactagttcaaccattgtggaagtcagtgtggcgattcctcagggatctagaactagaaataccatttgacccagccatcccattactgggtatatacccaaaggactataaatcatgctgctataaagacacatgcacacgtatgtttattgcggcactattcacagtagcaaagacttggaaccaacccaaatgtccaacaatgatagactggattaagaaaatgtggcacatatacaccatggaatactatgcagccataaaaaatgatgagttcatgtcctttgtagggacatggatgaaactggaaatcatcattctcagtaaactatcgcaagaacaagaaaccaaacaccgcatattctcactcacaggtgggaattgaacaatgagaacacatggacacaggagggggaacatcacactctggggactgttttggggtgggggaagcggggaggaatagcagtgggagatatacctaatgctagatgacgagttagtgggtgcagcgcaccagcatgtcacatgtatacatatgtaactaacctgcgcattgtgcacatgtaccctaaaacttaaagtataataataaacaaaaataaaaaaataaaaaaacacacatttttaatctacgagagactgatacataaaattcaacaaaaatgagttactagaaaaattaacttaaaaaaagaagacataaaagtaccagtttttaaattagattcaacacatacaaaaattctctgtaaaactgctataaaagtctctaaatgcttactctcaatttcagtacttatgttatcatggaccagtgacaaacagttggcgactcagcagtggtctgtggcacacatttgagtagtattgctttaaatatcaatatgaaatttttatatatatataattttgaagtaaatgaatatatatatttatatatataaatatatatttatatatatatataaaaatatatataaatatatataaawatatatttatataaatatttattttgaagtacatgaatatatatatttatataaatatatatataaatattcatttacttcaaaatttatatctataccccagaccatttctctggccttctgatttacacgtggagattaccatctctctcttagttaatggcattatttctactcaggagaaatctgttattattatctctttctcctcctcacctgtccaaccaatccatcatttatgtcctattgaattttgctattctgtacatctttactgctagcttcttagtccaaagccaccaatgtctgatacaacttaataccagccttcctgcttctactactccatcctctttcttccattctgcatagagttacaagaatgagttttctaaaaaggtaaatctgtttataacattttattggcttcatgttttaattacagtttccttgggtgaatggtatgtaacaattacattttcaagtcgttgagaggcagtactctagatgggtggtttaatagcttagttggggtggtggttgtgtaaatgttaaaaattctgatttgagaggttgccagatattaagattaagaaggaataaatcagaggctggagatatttaggaagccctgtagccaaagggatactattctcttagtgctttaactgtacatttacctctcatttccttccggtttaaaactgagccagatcccagtctttcacggggataattgacatatcaggtagcaggctaatttgtattagcagcaatctggaagtaacttgtggggttgaattctaagtagactaaggaggatgcaacatacaaatatgtgtgtacttaattcagatggagccaaatttatgtataggagtgttgttaacaggagtctggatttaatgtgttaacttcagcacctggaaatggctccagcaatttgcctggttatttgattcaaacttgggttcagcaatggccaacatttcaatgtggttgagatcccttaacgtttctagctgtgcaggtaggaggaaagtgaaatggcacaatacatttattatatgcagtcctctcctgtacctcctcactccaacccttstgagattccagaggacatacccatgattaagaattgagaaatgtcttggtgaggggagcagacctgtatggtatctctcagctgggaaatcttactgggatatgctgccattgagctagaattgatttcagtggggatcacggggctctggagtggcaaagggcttttttggcagtgctttggcttcatggataaggtagctatcattttcatagtaggcttagatgtggagtggcagtcagtgttttgaaatgcagcctttagtggtcgtggctaattggttataatgtccttaagcatacaataaattggccatttaacatatttttacttgatctctataactggggaaattctagctgtgtggagtagaaacttgacatttgctactgataataggagccctttggagccccttgattgaaggtgagactgatttcccttgagaaaggacatgaaatactaccacaaatgtayactttaaatcttccaaggctttcctaaagggacttgctgtttactgggaaaaagcccagacttttgaaaattaataaaaatgggtcctggattaatccctggggggaccgcagtgccactctggcatatcagttcgagtcaaggcttatggaagtcgcctggaaaattgacttccagctgcatccgcatcgccatgggtccagtggcttggctgactagtcctgtgattttcccacttcctgaatgcatgattgcatcaagcctggaaattggcagaattttcacattgaccccttgtggagtgaggactatttaggaagactaagtggaagcccctgaaactgcccttcactaacaaaagacaaaactttaagcagtgctacatccctacaaacattgcacagagcagggctaccttcaaagacttcaatctcagtggagaatataacatctctttttgatttgctgattggatgaatggatcttggagatcaaatatggagtaacataatcctaatcagagagtgactcttagttgctttgctttccaaaatgtagtatcagtatacatttgtcaccccatgtccatgggggatatgttccaaggcccccaagtggatgcctgaaactgcagatagtactgaaccctacatatactatttatttgatctgataactgagatagctactaaatgactaagtggcaggtaaaatagacagtgtagatacatcagataaagggatgattcagatcccaggtgagatggagctgggacagtgtgagatttcatcacactattctcaatgacacacagtttaaaacttatgaatgtttacttctggaattttccatttaatatttttgtaccacattgacctcaggtaactaaaactacagaaagtgggtgactcctgtagtcctttgcacctggaatgccacaactgatacggcatcttttttttcttgctgtgccagttagattagaggcacattgtcttcagctagtgagaagaactgaacaccttcattgttttagggcagggtgataaaagtcttctgatctcatcataatatggctcatggagaccttgaccatctagatatgtagaaaacatctcaaactagtaccctaaagcaaacatgcttttgaatctgatgatcaggaagtagcaagtaggtggtttagtaggactcacacgtgccagatgttggatgataaactctgtgctttaaagttggtaatcttgcaaaacttaatttaatactgtgttcaaatattgattcaacactattgagtctataggtttttttccccaaatgacttgtgtttaattaaataaggaaaacaaagaacttgatagtaatttgaaaagaaggtacttgctttgaacaacttacacagtatcagacctctaaaatacaaatttctctgtagcgttttgacttgagcttcatttttgaatggagatttttttaattgaagtttttcaactggaaaatacatttaggaaatttagtgtatttattttacacacatactttcatatgtaaaagttaacataacatttacaaatacaactctgtagtttaatgctttatatataaaagtaagaataaaagttattttggaaaactttagaaataaaccagagtttttgccttcaagttgtttatgattgattatacctaatgctcttaatcaaataaaatcttgtttgtatttagcaaaataatagatggcttcagaaaataagtacttatatagataggaaaggcaaatttgtacaactctcaccttttgttcaagtgtagaaacagaatccatgccagcaatttattgagtatttactatgagccaggtactgttgtagataattggaatataggtgtgaacaaggagactataaagctcatacatttgaggagcttactttccagcagcaggagacaggcgatacacaataaacatcacaaatattggatgataaatgccatggcaaaaagaaaacatagaagaatataataaaaacgggaattgagtgtggaggggcagttttaaataggcgtatttcaggttaggaactattgagaagctgacatttgtggaaagacctgcaggggaattagtcatgcactgtctggtggaagagtgtaccagacctaagaaatggccagtgcaaaagcctctacacaggggtttgccaagagcaggggtccccaaactttggcaccagcgactggttttgtggaagacaatttttccatgaatggggggcaggggattgttttgggatgattcaagtgcattacattttttttgtgcactttatttctattttattacattgtaatatataatgaaataattatacaactcaccataatgtagaattggtgggagccctgagcttgttttcctgcaactagatgatcctgtctgggggtgatgggagacagtgacagatcatcaggcattagattctcatgggaacacgcaacttagatcccttgcatgtgcagttcacagtaggkttctatgtgaaccctgttagattctgctatgggaatctaatgccaccgctgatctgacaggaggtggagctcaggcagtaatgcaagcaatggggagtggctataaatacagatgaagcttctttgtgtttatttttgccattcacctcctgctgtgcgacacaattcctaacaggccatggaccggtggggacccctggcctagagtattcaggaaacagcaaatagaagagtttgtatgggacagaatgagctagggacagagcagtaagaaaggacattaagaaagataagggaggaaggatcagatgacaccacaaatacttgtagattgctgtaaagactttggttagcttttactgtgagtgacatggggagccactgaagcgttttgagaagacaaatgacatgaacttatgacttaaaatgattactctgggtgactatattgaaaatagattgtaggaggcaaggatgtaaacaggacgactagttatggctattatgtgatccaaatgagagatgatggtgrcttgaatcagtatcttaggagtgatggtaagaaattataaaattgaattcattctgattctgttatgaaagctgagtcaaaagcacttcctggtggattggatgtgagagaaagagaagaatcaagggtgacttcaaagtttttggaatgaacaataggaaaaaatttaagtgacctgggcccgggttatcatttagttagatatagggacagtactatagcttggatttcaatatttatagcttgcagatttaaatgcataaatctcatagattgtaaggacaaagaccacacttatttggaattttttaatatatgtgaatctgggattttagtcggatgtggacttgctgcatatgtttgcctaatataaaatatgctgtattatagtctagtatatcatatttttgagggacagtcatcttgattaatagcagcctttctatttcattttattttttgacgtggcttaatgtaattctcatagtgttatgtatattcgttgatttaacaactatattttaatgcttagtatatgtcagacattgtgttaggtgctgggctataggaataaacaaagcagacaattgtcttcatggtgatgtaatcattgtctgaagtttttgtttgttattgttttgtttttgtttttcccattacaatagtttttgtataataattagaaacaaaaattagtgtttttttgggaattaagaagagattttagacttatgtatgtagggttttgtattagtatgttctcacactactataaagaaatacctgaaactgagtaacttgtaaataaaagaagtttaattggctcatggttctgcagtctgtacaggaagcatggctggggaggtctcaggaaagttacattcatggcggaaggtgaagaggaaggaggcatgtgttacatggttggagcaggaggaagagggtgaaaggagaagtattacacacttttaaaacaaccagatctcatgagaactcactatcatgagaccaggaagggggaatctgcccctgtgatccagtcgccttccaccaggcccctcctccaacattaggtattattacaatttgacatgagatttgggtgggtacacaaatccaaaccatatcaggcttcaacaggaggcaaatgacaatcaaaatgttatcatctaaggagtattaatttataaagtgagtatttgtaaagatatggtaatagggaatccatagtggataattccagtggcttagcttttgagttgctaatacctgtaggcctgaaggaataaaagaaggagccattcacctaatgtgaaacaagaaaatcatgtacagtcatccattttgatagtagcagtgatcttagttcaggggacatagtcaactcaattgcagggagggacctggagaataagtgtcgtgatctactccacttctccatgatctcttcctggacctttcaaatggccaaaccctgctcaggccagaggtctgtgatacagtccatagaggttgggttcccagggcagaaaatggtataggatgttggaattaaagatgtaaaattaaagatgtatggtacagcctttctactttgcctctcagcctatattaccttttttcagggttaaaagtttgggatcctgacttaggtaatccacaaagtcccatcagctaccctatcatcaagtgatgtaaaaccggttataccttacttgaaacataacatattggctaccactggtactcttcatataaggtagcacagcaaaacagagaaaataactggcttaagtcatataaacatatttgctacagactccatgtctgtagatggtcacaaggctcagtttgtaatcacagctgcctccgtattggctacacggggttctttatgaagttaacctttaagagtttcattcctacaggatctcagtcttcggctgtgtttttattaggttgctgcagttttcctttactgaaactagaaggctttctggtatattttctgattctcagcagtcctcctggcttctgttgtgaaactgccacccaatttgctttttttctttccacgcttcagtgacatgaagaacacaaaatggccacacagtagtgttagctttcaattaactgaaaatatgatcatgttccttggtggaagaattccccactttgaacatgaggacttccaaactcaccaagcctaaaattggggagtgaagcaaaattcttccagtagcttatcaattattacagtgaaaagggctagtcccacctcttttgtttcattcctggacccacattctgcctatggggagataacactatatatttgctgctagtttgaagcatatactgtatcttactggtcagaacctcaacccgtcaagctgtttcctacccaatatcattataattgagacttcagcagactcttctaccattttataaagccatctgtttctgggtgatggagcacatagtaataccagtgaattacttgagtgtaagctcatcatctatatagtatgccctctggtcacaggccctgttgtgtcatgtaacacagcaattgacaaaggataagttaagtctgttgatggcrttggaaacactgtaggcaacaaagacaaatctacacccagaataagtatttcttcttgggaggacacaaatattccccttccttcatgtggggtatccagtggtatcagcctgctcccacacagttggttgatcagtccatagaatggtaacattctgaggtttatgggggcatcctgctctttgttggctgcatgcttagcatatatggtagtcagatatggtgaggggaagaacatggtgagggaaagaccatgaacccatggatagcatccattcttgcaaccctagcagctttgtacataagcaaagcatgtattggctggggaaactggctgactgacatccactgaattgaccatcagtgttcatctgatgtctaagaggccactcctgcctgtgtgttctatgatgggtatttatatgggcatgaatatcatcctactctgtacttcttcctagaggtcaatacctgtcactgatttctaagttactttcttcccaagattatgccctgtttgccagaacttgcacttactagctcataagtcaatgtagaactgtacttctagttactttttattccaaagtggaaaaccacatgtacaacctagttctgctcattggagaggctgtcactgagtgggcttacaattcactcctagcttatgcaggcatactgtgcagatggagctgttctacaggctcatgcattttccttcttaacttcctggccactgggacctgcccatgacaccaaacctgtgggtttaagggagaggcggaaacagtaggaacaagtgactttggagttcaagtcacttgtttgggtagtttagtttacttgtgccttctaaacatgctttggtctggtcttgtatatactatttccattttatagtggaattccattttgcaagttcattttgagggtttgtttgatagaacagataataatcagttccaaacaggcagtttaaatagtcacttaatatttaatgggcaggctgttaatctctgctagcacctagtaagctaaaaactgcttttcagagagagtagctgtctacagagaaaagcatggatactctaatgcagtccccacataccagcttcttgagtcagagagtggtgtgcaaaaaaaaaagggggggtgaatttggaggggcagatggacgatacttgatagactttgaacactgaagaattttaatgagaaacatttaattagcttttctgttatacatctttgtgtataagaaggcagcagtagtgatttgatttgggattagaatttgatttaatttcattgtattgatctttcacattgtacttttcttttgtcagggatttttctttctttttccttttcttcttgtccttttttcactctctcttctcccctctctcctcctcctctctttccagtagtaattagaatatatttttgttgtataatccattgcaatatatggctaaactaaaggtckcagctctagactagactggttatccactgctagccrcatttactgtgtccagtttcttttctgttattacctgcctctcttggctcttagaggaaaagttggatgatgtgattttgcattatttttgttatctatctctgttaggatagatctgtggtcagagtaactagaaagtatataactataatttgattatatcattttttgcattattatagttcctccttatgcctttctataggagtcctacttcagaaattactaagtttttgtatttccttttacagagtttaaattactttcaatacatttacttatctttaggatgacagacgtttttgattctatgatatgtatatgaggcagattcttgctcaaggagacattttaaattcaggaagtttgacatcgttttttttaccctcagtattattatatcttttggttcatttgtcatgttttataatgttaatgattgaacagctaatctgtatacaaataaaataggtactgccaggcaaccaatttttattgctgactttttggtaattgggagggttaattgataattctatataattatataatttgattctaaataatattataggagcagctttaaaaataatcttttgccttggcaattctggctaggtgtcagttttagagaaagaaggctacatttaagaatctgttactttggaggccatcaggacaggctggaattatgagaaaccaaatgtcacttcaatttattcagcatgaatttattttccaaaagaagcttaaaaatatactgcctactttttccctatttttacttggagtctcattttatattgacattcatattctcttttgtactttagcttgaaatttgttaaagtttctcataatttgaagaattgcactggagacatttggctttacattatgcaatgaatgctaattgacarctgattcataattagttaattgtaaacacttaactacagaaatttgttcagtgcactaaaagcccagacatcaccactgtgcaatgtatgcatgtaagaatctgcacttgtgcctccaaaatctataacaattcaaattaaaaagtatagaaatttaacaagtctggattgataacccttcttaaaaagtagctgttctaggaatgccttggtcaaattctcatctgtaggattagagatcttctgatgccatatgattaatgattttttcccctttctcatggtagattagtaatttgtgactcttttgtttattcttcaatagtgataagatccgtggatcccttttaggaagttttacaaatattgcaccaagggaagaaaatgtgtaacatttgcaggattaaaggaattatgaagagaattttgcccaggaattaagcatgtttgcattttcatatttttatgaaggaatatcaagtatcctggacattgaactgtctcagtgtggaaattaagttgactggatgttactatgggtatcatttctgccttagggaagagaacaaaaggaaacaggaccccataccctcctccacccatcattactaactttgaataagtcaccatgacgtagacccataatcaaaatgtcagccccaccccagaaactgacacatatccttggtattaaatgaaagtaatttttaaaaagaagtctgcartatcagccgggcacggtggctcacgcctataatcctagcattttgggaggctgaggagggcagatcacgaggtcaggagtccgagaccagcctggccagtatggtggaatcttgtctctactaaaaatacaaaaattagccaggcatggtggcgcatgcctgtagtcccagccacttgggaggctgaggcaggagaatagcttgaacctgggaggcagaggttgctaggagctgagattgtgccactgcattctagcctgaagacagacagagactccatctcaaaaaaaaaaaaaaagtctgcaatatcaaagatgccatatttaaataaaaactaccaaataaagtacaataagatacaccatttaattttttcaccttaaatttttttcttaaaaaaaataaaaacagtgaaatacatcttaaattacttcactgcctgttacactgagagtcccagtgatagatctgttttattactgtttgtttcaataaccatttcctgtctccctcttacttccagcaacattctcaaaaccacgctcacaaacartaaatactaaaagcagtggcactgaagcatgacgtactcatcttcattctcctctaagcctggttaccaccaaagcacaaaagcccagctccacaccctcaagagcaacatcctgaagggggattgaagggggatgtattgttagagattctaatcctgaaaggagaaatatgatcttatgaaaaatacatataattgaattttatcaaacttgggacaccatgtaaaactgagttattaatgtgsttcatattcctctaaaaagctaaaaaaaaaaaggcctattgattatcagtttaagtaacctttattaagaagaaatatgttgagcatttttgggcatcactttgttgggtgcccaaagccaagagagcatcatcaactctggggaatgactgcttggaacatttggaagaatccctctgttggtacaagcttgaaacacagctcatgtcatgccccagtgttgcttagaatcttctatatgcagttataaccactgaagatttgttagtcaatgatggaccacatcttcagtggtggttccataagattataatgaagctgaaaaaatgtttatcacatagtgacatcaccaataatgccatagtgcaatgcactaatgtgtttctagagatgctgatgaaaacaaacctgctgtgctcccagtcatataaaagtagagcatatacaattatatacagtatatactgcttaataatgataatacatgttaccagttatgtatttattatactatactttaaattgttattttacagtgtactactactatgtatattaaaaaattarttaactataaagcatcctcaggcaggctcttcaggagggattccagaagaaggcattgttatcataggagatgacagttccatgtgtgttactgctcctgaagaccttccagtgggacaagatatggaggtggaagacagtgatattgataatcctgacccggggtaggccaaaagatataaggaaagaaaataaaaatttaaagaaagaaaatatatttgtacagctttacaacttgcttgtgttgtaagctacatattattacaaaagagtccaaaagttaagaaaaaattaaaaagtttataaaatagaaaagttactgtaagctaaggttaatttattattgaagaataaaaaatgtttaaatataaatttagcgtagcctgtgacagtgtgtataaagcctttagtagagtacagaagcaacacgtctaccagcagacatttaaaagagtttagtgtacatactaattatatgaaaaggttttttgtttatatgtctatttgtaggccttgtgtccaaaaattgagtccagtaacaggcattttggcaagcatctcagaaatcttgatttcgacaaatagctcagttgagtgagatgcagatggacaacacagaaacacacgttttgagagtaatatgtaagtttaaatgcagttgttggctttatagactttatgtgattagcattttattttagagggcttagatatgaagacattttttatttttttcaaattttagatttgcatttttttatttttagtaaaactaatttttgcttttggtgaatgaaatttcttttctttcaatgaaagacatcacattttcatgtataaggatgaaatcattaaatcactgtttgttaagctaagatgttgtgactattaaaggggtttggaatgatgtaaaggagctgtggaaacgggaaatagaaattttggaatactttgtagtgagttagagcttttatttatttatttttcttcagaaaaggtttttccttcctgaaaaatctgtgattctttttattgactagaaagatttggagcaggggtgaatttgattagagatcataattttaatacacatgttggtactatagaactgtgggaaataattagtgaacagtatcttaatgcacttattatcatattgggaagcatttccatcttttaaatttagaatgttaataagaaaatgcttgtaaatacgacctttaatgtgaatttggagacaaacctagttccacttaaagtgagttatataaaatattttaaagataaacatatatatttcctgtggaatgaatcttttgttgcatttgggcttttctcaattatagccatgttcactgaaccagtacaggaactgagaatggagtcttgtggagaaaaatgtcaaatatacttttctcagcagttgttgagctgcccagttcttgatggggtacaattattgtttaggtgttgattctagtagcaagttaaagggagggaatttgaaaccttgtgttttccaaggattagaaataaaaacaaagaaagcaaaacaagcaaacacaggaccaaagctcaagctttgattttgaagttgatttttgaggccgcatgactaatgcttttcatagtactgcatactggccgtgagcaggaagcaaagcagatagagtggctgcagatacataattacatggctgcctctgtcttctctgggagtttttaaatggaaataatgttgttcttgagggtgcagagctggacttttgtgcgttggtggtaaccagtcttagcagagaatgagtacgtcatgcttcagtgccactacttttagtatttattgtttgtgagcgtggttgtgagaatgttgctggaagtaagaagaaagaaggaaaataggtattgaagcaaacaataataaaatagatcgatcactgggattctctgtgcaacaggcagtgaagtaatttaagatgtatttcactatttctttttaagaaaaaaatctaaggtgaaaaaattaaatggtttatcttactgtcctttctgtggtagtttttatttaaatatggcatctttgatattgcagacttctttttaaaaattacttttatttggctgggcgcagtggctcacacctgtaatcccagcactttgggaggctgaggcgggcggatcacgaggtcaggagatcaagaccatcctggctaacatggtgaaaccccctctctactaaaaatacaaaaaaaaaaaaacaaaacaacttttatttaataccaaggatatatgtcagtttctggtatagggtggggttgacatttggaaaatgaataaggaagtatcagaaagctttagatatgttatatccttgaggatatgacactatgagcaaataacactagagaagccttaccaacctgtaatttcttgaagacaggtaccacgtttttttcatttttattttgttccagtgatattttattcaggagtgcctactattgttagatatctgattaggtattagagatttgaatagattatatgtatgcaagtatgagattatatatgtgtatataagtacatatatatttacttgtgtrtatatatatatatatatatatacacacacacacacacgtgtgtgtgcccatgcacataccctagagcctaaacattttttgaatgagttaataagtgggttaaagggggtgggaaaactgaatatagacagagccatcgaagccttgaagggtctcatacattccatttcagcagaatggtcaggtttagctggccatattttggattaggacagttatgactactattacagtgatttgaacagtagacttgctaatgagatataagttttcattatttggctgtcctcatttcttcctcatctacttttcaataaactttcaaacttttcttaaagtagacaatttgattaaacatgctctaccttaaaacttttaaattatttttaaataataaattttaaagtaatattatagatcctttcataatttacttaatattttgtctttgtatgtttatagtaggaaaaaatagaaaaayagagataaaagcaaagaaaaatcattaaccccattatcaagagaccatagttacattctgatatacagtgtatcagataacttttctatatattagtatacatccataattaaatgggcaaccctttaaacttgattcttttttgcacttagtgtatcatgaacatctttttatgtcactaaatgtagatccaacacttcaatattaaatgtatgaatgtcacatacataatatctgtgatacgcatgggcagtgcttaataatttgaaaatattatacatgagtattaattctaacggctaagttttcccataagaattttgagaattcttaagagggatttgaaattgtgttgaattagccactgttacaagttattacaatgatgatgattactgtttttaaggtactttaaaataaaaagctcttttaaaattctggttctgctaataacttgctgagtgcccttagtaaagtagcttaacttttctgattcttgggttcctcatttgtgcaacaagtacagaatttttaacatacagaatagaaagaattagatgttgtttggggggcacttagcacaatgctaggtacatagtaaatgcaataatcagtatcagttattgaaatcaccccagattgttaagaaattttctactcttacaagcatctcatggtgaaacatgctgagagaaacatttgttctagctctgtttcttaatggttgctgtactagatgctgaggacataattttaaacaaaacatgatccttggctttatggcacctataatctggtagggaaaatatgtcagcagataaatttatartactgtataattatataccatttgagcagtttggtcaaagctctccgtgaactcagtcttgggaaaggttgacccataagtaatgaggtgcctatgtgagttcactatttcacttgttttaattatgaataggccaaaacagtaattatttgtatcagtatgtctggtcagagcactttgggatcacagaattgaaaaactgttccccataagcaatacaaggcttaggtgaatttaaagtttccattttactgatgttgaataggctactaaattaagtatcagtatgacattattagcacacagatttagttgtacttacatgaaatttagctttgggttttctttttttttttttttttcatgtgtttttttttatttttttttttattttttttttttttattatactctaagttttagggtacatgtgcacattgtgcaggttagttacatatgtatacatgtgccatgctggtgcgctgcacccactaatgtgtcatctagcattaggtatatctcccaatgctatccctcccccctcccccgaccccaccacagtccccagagtgtgatattccccttcctgtgtccatgtgatctcattgttcaattcccacctatgagtgagaatatgcggtgtttggttttttgttcttgcgatagtttactgagaatgatggtttccaatttcatccatgtccctacaaaggatatgaactcatcattttttatggctgcatagtattccatggtgtatatgtgccacattttcttaatccagtctatcattgttggacatttgggttggttccaagtctttgctattgtgaatagtgccgcaataaacatacgtgtgcatgtgggttttcttttaaatctgcttgtagcattatgctcttggttatagtagtttcatttggtgaggaacttgataatatggtaagtgaaatgtatcagtgttattttacattcatacattacatcattacaagacctacagagtagagttgctcagtaacatttaaataccttatctcaatttcaatttgggtaaatagttaaaagaataaaataggtaatggaggagatgtaataaattgagacatgcacacaatgcagaggaccactgtacttgccaaactgtacctgtgctttcagacctattctgtttcatcrgagttaggttattggctgtaaaatcaatgggtttgtgtatataagatatatatatatatatatatacacacacacacatacacacacacacacagtgtgtgcgtgtgtgtatgtgtgtatatgcatatgttatacaatgtgatatatatgtagatagatagatatagatataaggcttgaatttttataaattaaaagagatcttgccaatatgtaggcagccactatgaaagctcttatgatctttgtagttttgtgcctgacagaattttgaaacctttgtctctctcagtaaaggcaaagaactgtcagagtgtttgatagatctttgatatttcactgctatttagtccaaaagatgtggatttttttgttgttggaaatatatatatctcctgagattctttgatatattttaatgtagtgtgtcctatgccattgtcaaagtgataactgattcatttatcctgttcctaatataaaaacattcacaaggctaacatccatggctctctggctatatttaataaattcataagtgtgattgggtttgttgatatgcaaagtgtcaatttatatcagttttctgatctttgattattgttttaggtaaaaaaattagtgtttgttagtttttactttactattgatataaccatcttgtttgaaactatatatcataaagatataaattcttatatctctgatatatagtttcaaactacctatcaaaataatacttcaaactatgttttaaactatatattcaaaaagtatttgtttccagatcttgcttcagatcaattaattcaagtttattgtgacaggaacactccccaaataaaaattctctgggcaattaaaatcatatgtgtctctttctctttgttgactgtataaaataaaataagactgggcatggtggctcatgcctgtaatcccagcactttgggaggctgaggcaggtgaatcacttgaggtcaggagtttgacaccagcctggccaccatgtcaaaaccccatctctactgaaaatacaaaaattagttgggcatggtggcacgtgcctgtaatcccagctacttgggaggctgaggtgggaggatcgcttgagctagggaggaggaggttgcagtgagccaggatcacactgctgcactccagcctgcaagacagaataaaactctgtctcaaaaccaaccaaccaaacgaacaaaaaaaccgaaatcccaaaaataaaataggaaaagttaacatactttgtgaatttgttcacttactgtaagtgatacattttaatgtttttcaagtgagttttccaccaattttatttttgaccagttgtatcacacttacctagagcagaattttttttcttcaatggttcaacttattaaaattatttaagacatgctaagtaacaagtaatttaaactgagtatacaagattaagtcagctggtaaactgtaaactgcaaaacttactggggtgggcagggcgcggtggctaactcctataatcccagcactttgggaggtcgaggtgggcggatcacctgaggtcaggagtttgagaccagcctgaccaacgtggagaaatctcgtctctacaaaaatacaaaattagctgggtgtggtggtgcatgcctgtaatcccaactattagggaggctgaggcaggagaatcacttgaacccaggaggcggaggttgcggtgagccaagattgtgccatttcactccagcctgggcaacaagagcaaaactccatctcaaaaaacaaaacaaaacaaaacaaacaaaacaaacttattggagtgatattaagaatggtcaaggaccaatgctttggaggtaaaatcttgggtttatatttcagcttcacacacagactagctgtgtgaccttgagcaagattgcttaacctcttcagttttctcatctgtgcaataggaataatgctacttctcccggtgttgggttattgtgagagcttaagtaagctttcatttgtaagttagaacaatgcctggaacatagtaagtactccataagatactggtcattataatttacaatttgtaatatttataaattattattattttttctgtccagattatttctctttttaaaattttctgtgttggccaggcacagtggctcacgcctgtaatcccagcactttgggaagctgaggcgggtggatcacctgaggtcaggagtttgagaccagactggccaacatggtcaaaccccacctatactaaaatatacaaaattggccaggcgtggtggcgcacgcctgtagtcccagctactcaggaggttgagtcaggagattcgcctgaagccaggaggtggaggttgcagtgaactgaaattgtgccactgcactccagcctgggttagagagtaagattccttctcaataaataaataaataaataaataaataaataaaataaaatttcctgtgtcttttatatttcataagtggtttataccctgcattttattttaagaaaaaatataaatgtaacatgtttcttgtacatggtaaaatatgtactttttggtttttgtgggaaatgtgcaaaataacctttgtgttggggtacattttttttctttttgggttgggaaaattttagcacccaaataagaatcaaagaagtttagagtatagattataggatggaacctttcaattcaacttcttcattttgtagaagaagaacctaaaactttggatattcatctttccaaaggtcacattgctagtatcttagagttgggtctagagtgtggacctttcgattctttaacctccctctccattttgtttttcccgtggtgaggatagcatttttgacagtgtttgagtaactgtaacatccatattgaaagacagaaaagacataagcatcatcactttgaaactattcatggatacaatgaaagtcacattaagaacaatatcctagtgatgacttaaaagattgggattgcttctcagcaagttagttgaccatacattctcaggagcatactactgtgcagatgtggtccaccttgcagaggacctaaagcttctgtctgtctagcccatacctctggtctttgccacgtaatttttccaaaaagagaaacctgaatacagaagagcagagtgttatttgagccaagagctggtgaaacattaagtcagaatgcttcctagaaatcagtagactaagactgtgttagctcatgtttcatattacacaagagaaaataaactgaaaggtcagttgaacagttacagcattgcccttttccaaggtaatcagcagagcatgtagcaaagacctgaacaggagcgtgactggaaagagagtggctgataaagaggctggcagcttaaagtgcttgggacaatacttgacacttccaggcctgaccagatgggccatctcacagggcttaccttcagtaactctgatttattgcattcagatgtgtgtatgtgtgagcgtttgttaggcagtcaggttttcactttgccagaagactctagaaattttaatattgaccattaatcatacctcagtaaactgtaaagtcaatatattattaatttgcttgcaaccaagagacaaggcacagtgattaaaattaatttctagctatattttgttaaatttattctaattaatctgttaagtcaaaatatgtttacattaatggctttatagtaggttctttaagttgtgtcattaaacgtgatagtatttccattattctgaatgtagaataatgtagtataaataaatattgttaaaagaaatggagttttaaggatttctaaatggtaccactaaatgggctttgtccagttttttgttaattgaataagaacatttctttttcttttcttgattttataggatttagacctagaaagatcttagcagtgatctcccttgaccccctcacatctatggcccagtgccagaaattaagaaagaatatttaacaaataatagccgctatttacttttgggacactcttttaaatagtagcaacttttaaaagataataattttgaatttacctcatacttcctcccccaccaaatacttaatgatctcttcataaccataacttctctatatattttattaatttgagactgaaagtagccaattttcattgcacttaactttagactaagtaagaacaaaactatgacttaattagcttttattccttcacatcagaaaataagacactaacaattttttcttaaatgtggactgaggatgtgtttattagattggtcacaatgcatttgattgtgttttagagatggtacaatatgaataaaatttaaaaagattaaaattaataacacaatgtgtgcttgtaatgggattaatgtttaaattttatttttgtattaaaattagcatagcagagcaattccagttttttcatgttttaagttttctacttagaaattggagactaatgatttgctgaaagtagttaataatttacaactaaatgagatcttcatttcttattttttttaaaaagaaagatgtaacgtgtcataaaataatttattttttgtgggctggttatatataagcacagccacctagacatcaatgatattatcattcctttttataaatgaggaagcagaaattctgagattgttaagtgaaaattgaaggtcagttgctaatgggactagcaatatataactcagtcttttatttgtgaatctrttctttcttgtgtagtaccatgcctggcacatagtaggtggtatataccaattagtcttagagtaattccatatatgaaacaactcatttaatagctagtttcaaatctcgtgaacctaggcattgataaagattataatagtgggaaaagctgcttgagtgaaaaaccaccgacctgcagtttgagcagaagtgaaatggtgggaattaactgtctgcaactcacttttaatcagttaggagtagtttgcacagagtagtttgcagtcattttgaagaacagtgagaggtttgtgttttcactcctggaacaggcggtctccactgggtcatcacatccccagtttattattcacctgtgcagatctgtatacatttgatcttgatagacacctgagctgatgcattgaattctcaagtgagacgatatatctccttttatagctggtcatttggtcacacaggatgttaaagaagaagagtgaggaatttatctaaggacttcttcccattttctgtcccgtaatggtcaaagtttgtcctttggagcctttattcttctacacattcattttattttgctatgaactacatgtttatatccactcagaccataaatgttgaaactctgatccatcatgtgatgatatttggagatggtacctgtgggaggtgattagttagatcacaagagcggccctctcctgacgtgattagtggctttataagaagagattggggagtgtttaggttgtttcctccctttcctgtctaccatgtcaggatacaatgagaatgtggccatcagaaaacaaggaagagtgccctcaccaaacgctggatctgctggttctcagtcttggacttcgcagcctctagaactataagaaataaatgcttgttttttaaaccgtccagtctatttgttataacagttcaaactgatcaagacatgcagtatctggcctcttcagatagctgcttgcaagccacaacctctatagggccagtcaagcaagtgtacaaggagagccagtgggactgactaaatcaggaagccacctatattatatctaatatagttacaggaattatatcttgtttatattctaatagtctattaatttttctgtttatctcatttccatcaatcttattgaatacattaattaatagtgtattcattatttcacatgaaagatattgtgctaaaaagtttaggtacattatttcatttgattttcaaagcagacttgtaagttccattattattcttatttcagattagaaaatttagttacagttggtaagcagtaggattaggattcaaatttaaacataataatcataatcttaaacctaactctaaccattttctcaccattgaaagaatctgatggataattggtgctcactaaatatttgttcattgaaaacttatgtgccagtattgtatgtactaggaagacatcagggttcaaaatagataattttcccagtctttgtggaatttcaaagcgaagaataccatttagtttagttcaaaggaaagaattacattcagaattacattctcttttctggttgtctttatcagtaacttacgtaatgctgtcctactccttgctttctcttctacggtctcccatacataacagagaatatcttcaagttgtggactttataatgtcttttatctctatattctcagtgactagcatagtactggatatacagtagactctcagtaatgcttgtataataaatagatggatttcactattccttgtcacctttgctcagtttcatttctactgttttctgatagatgaagtgaagagtgtatgctaagttgaatacagattggaaatgtcactgaaaatttatgtaggattttgaaaatagatgcatttggtgatttgatgacatttacaacattttaaaaataagaaatagttttcaaaaataagaaaccatgtgtaccatgatgtcatttaaaaaattcttttcattgctcactcttgtctaagaggaggatctgccaatatctgtgcttaatcgtttacttaataaatactttattaatttatggactctgcctaataaaattcatcgttcaaactgctccctgtaaaacatgtctctgatcatatcagttatctcctctgtaaagtttttaaggattttatgttttattccacttattatctgattgcagacaatctttttcatcccaattggccactggaatactccactttctcctgctctgactacacacagctagtcgtcatgtcgtcaagaagcatccaatttttacacatgtaatgcgcttctctgtcttttctccagctgtcaaaatgtactactcatccttcaagatacagcacaaatgccagctactccctaaagccttctcctaatctcttcttccagtcaaaatcactagttccttcctggtcttgctcattcttctgtgaacacttgcttatctcaggcctgtcctgtcatgagttggacattgtttcccattgcacagatgaacatcttacaagaaggatcttgtttcacgtaactgaattattagcacacaataaatatgtttatcctgcaataagtatgttgggtatttttgtcraataattgccctgattgaggaacataaaatactcactttaaagtctcgagtggttaaccttcatttggcagccttaatatatgaataattttgtatattttggttatttttcacttaagaaagaaagtttctgtgagacacatgcagtctttttaaagactgagttggagagcttttttatttatttatttatttatttatttttattatactttaagttctagggtatatgtgcacaacgtgcaggtttattacatatgtatacatgtgccatattggtgtgctgcacccattaactcgtcatttacattaggtatatttcctaatgctatccctccccccttcccccaccccacgacaggccccagtgtgtgatgttccccttcctgtgtccaagtgttctcattgttcaattcccacctatgagtgagaacatgcggtgtttggttttttgtccttgtgatagtttgctgagaatgatggtttccagcttcatccatgtccctacaagggacatgaactcatccttttttatggctgtatagtattccatggtgtatatgtgccatattttcttaatccagtctatcactgatggacatttgggttggttccaagtctgctattgtgaatagtgctgcaataaacatacatgtgcatgtgtctatagcagcatgatttataatcctttgggtacatacccaataatgggatggctgggtcaaatggtatttctagttctagatccttggggaatcgccactctgtcttccacaatggttgaactagtttacagtcccaccaacagtgtaaaagtgttcctatttctccacatcctctctagcacctgttgtttcctgactttttaatgatcgccattgtaactggtgtgagctggtatctcattttggttttgatttgcatttctctgatggccagtgatgatgagcattttttcatgtgtcttttggctgcataaatgtcttcttttgagaagtatctgttcatatccttcgcccacttcttgatggggttgtttttttcttgtaaatttgtttgagttctttgtagattctggatattagccctttgtcagatgagtagattgcaaaaattttctcccattctgtaggttgtctgttcacttcaatggtagtttcttttgctgtgcagaagctctttagtttaattagatcccatttgtcgatttcggcttctgttgccattgcttttggtgttttagacatgaagtccttgcccctgcctatgtcctgaatggtattgcctaggttttcttctagggtttttatggttttaggtctaacatttaagtctttaatccattttgaattaatttttgtataagtgtaaggaagggatccagtttcagctttctacaaggctgcactaaccaaagcagcatggtactggtaccaaaacagagatatagaccaatggaacagaacagagccctcagaaataatactacacatctacaaccatctgatctttgacgaccctgacaaaaacaagaaatggggaaaggattccctatttaataaatggtgctggaaagttggagagcttttttacccttccaaaaattttcaactctccactcctttaaccctattttcccccttttgagctattaaaaatttctcttgaagttttacttctgtgctttttcttgcttctaatccaagcctcccataggaagcaaatgacaaaataaaatcttaaaaatcagctattaagaaaggagttttcctcgtgtgtttcttgggtttctggcctgctcagaagcacttgagaatggattctatactcaatacatttccaggtaagggatgatccatctccgctgagatgtctcctgtgttcacagtcctttctgtaattagagcttcagtactgatctgggatgaaccaactgccttccaggagagcaaagattttagtttgtttcattttgttttcatacctatcgcctagtagtaactccctgccgcccctccgtcccaccctgggtagtccagtcaactttattttcttccagactttccataactcacatattcaaatcaatttggagtgtgtgatatgtgttagtgtatttatatttgtatttttctattccaggaaaaaaatggaaagcattcttaaacacttttggaacttgggaaaaatcgtaatgttgctaatagctaatatgtgttttaaaatctaagcaagtgtaataagtaaaagaacattgataaagtaaaaagtatactatagtgttgccacttcaaggtggagaaaagttccagccaccatttattgaatattgcgggtaatgctcctgctgtttcattgattccttacaatctatgaggttcccccgagcccccaattaacatgttaaaaaaattaggaaaaaggagattaagggatttattcagagtcacatttggtgtgtaacagagttaggatttgaacgtggactatttctagaaataaagctaatatcagctacccctgattctcttaaatataagattaaattaattaaatataattataaggctaaatataattataaaattaattaccttaaaataagccgggcgtggtggtgggtgcctgtagtcccagctgctcgggaggctgaggcaggagaatggcgtgaacctgggaggcggagcttgtagtgagccgagatcgcggcactgcactccagcctgggcaacagagtgagagtccgtctcaaaaaaaaaaaaaaaaaaaaaaaaaagattaattaccttaagagtaaaacaacataaataactttctttaaaagtgaaatatgacttttaatttgagatttaacttgaaatctaccttttgtgattaatgatgtgtgatgtccttattgcttattaccttcttgatcttggacaatttatgtctttatgtttgcctctgtctcttcctatgtaacagaggatttaaaacattgatatagacgtcacatctgataatttttataacagttctttatatctatacaaaatgctagttcctgtagtagtttcattttatgttcttggttaccagaaatttgacctagtttttaaatatcctstaaatccatagcaaaatattaggagagatgactgtagtaggagagggcacaggcatgatgagcttgctgtatcctcaggcattttcctttttgagccacaatgatttcaaagtacaatgtgtatttctgtatcagaagctgtagggctgaccttgagggaagtcaagatacttagttaaagtaatataatgctataatcgtggttccatggaaattttactaaatgggacgtttgaaaatactttaagaaacttcctaaaaatgattattttttaaacttaaactttacataaatctaaaaatttatcataaggtatgatacsaacattgaaagtaaaattactaccacatttgtttatcctcccaacgttatacctttttggaaaatcagtagttttccttgtattatgagggtgtatgtgtgtgtatattttttaccctaagttcagtttttgttttgttgattgttccacactgtttgatcattttattgcctgttattacttacataacttaatatggattagcatttccatattccaagaagtatagatgactgatattgggaagaggttaaaaaaacacacacacaaagaaccttttctcatatgatttaaagagtttgcatatggtattccatcaggcctgcatatctagtttgttcgtctaggtaagtattttaagtattttgaaacagttgccactgtttaaattaggaagagttcatagaaaaatctgtatttttttatgttcttgaataattacatgattggacaaactatgctacgcagcaatgaggtgtaactattaaatagaggctgtgcttttagatgaggcttgtactctccatctcaacagtttctttctgccttgttttccttaattatgttatcatcagctttgcaattttgtgtttcttgtgtggggtcagctcctcataattgttacacctgcctggcctggctccttggggtggttcagtttatgtccccttgaataacactatctgtgagactgggattatttcgggcaagattccatatcagcacattttgccctacctcattttttttgatggttgtcatataatttattatttggatattccacagttattcacctagtttcccattgttgcaaaagtgggttattttccatggttttgtagtataaatagtgccataaagaataaatattattatatacatagatgtctttgcatctttgtgtgatgtatatccaaagaacaaatttctaaaaatagagttacttgaagagtgtgattttgaaattttcatagctgttgccaaattgttttctaatttatatttcaaccaagagcatttaaaaatgtcttttctcctgaaccatatcccatccatatagactatcatatgtttctgggtcttttaggtggaaaattgaattttgaagtttaggtttgcacttctttagttatatatgagtttgatcattgtttccaatgtttattggccacttgtatttcattttccatgatctcttggacttacttatttttaaaatattaaagtttataaatttgatttctctggaagttattttggttttagagatctacttttttatgacaaacttatagatttcaatattttattgaataagccatcctttccttatggttttgaaatgccctttcatcacatactgaatttttgcttctgcttaatactatttcagaaactcagtttttctccatagatctatttcaaatgctttcagttcctcaaattttataaacctagttttacatactcagtaaaattcctatgaatattatataaaattatgttactgttttaataatgtgaaaaattatagttttaggaaaactgtacttcattttttaaaatggtagttatttgttatacgtgattagaacaatgcaacagagaaagtaaaaagaaacctcaccaaaataatcccactgatattaagggtatatcattcttgatatttttatatgcctatctttagatagcaggttaaagaaaatgcttgatagaaatactataatgagacatgagaaaataaatgtctgttaactttaaacaatgaaactaaagtgaaatggaaagaagaaattattggaattcgtatacaaatttctttaccttaaatagttatttcttaaatgctcatctaagattaataaagaaattaaaaagtataatgatgacaaccttaaattttactctgtgttgagtgactctctgctataaaatttcatccccctttcactcatgcctttttttaatataatatttttactttgtcagttgagatccttttttcatgatcacattcatacagttccacagttgtctagccaaggttctatatttaaggagtcagttcttagacacactcctacaataactgttcagtcttgtatgtgtttgtttttaatttttaattgccatttagaaaaatggaaagtagcttatttttcttctagaatggttcattagtgtcattgactaaaactcaattttaaatttgacaatatttaaaaaaatcccttagatatgaatagaaacttgtctcctaggatattcctagattacttttccttcttagaattgtgtggagttggctttatcttttggtttttaattaatgttgcctttttctgcctggttgtctatagactcatttcttttatcttttgaatttcagttgcttaaattgggatacattttgtgtgtgtttgtttcccaaacctttcttaaaacattgtatgctcttcttaatatgtggatttaattctttaggataattttccagttttatatcttccatattcattttatttggttttatttttcagtcagcagctatatccatatttggatcatttttttttgtctatgttgggtatctcttaggttctttttaatatattcaaattcattgtttttctttaattatttcaattctcaattatttattcatttaataatttgctatttttgctatacttatgtacttttttttgttgagtctaactcatcattatctattgatatactttattcctccatttatttccttaagtctgcagtcttttacttttcattctgttgtcatataatctttcagctcttattcttttgagtttatttttaattaagttgtataatgtgaagtatttgtaaaaaggtccattttctatgtagctaagttgagatgtggttcattattctgcatctcaaattttgtatattccctggacatcccgtgcctcgattcctgccatctttctgggaaagattccttacccctgagggtatggggaggtgtagagaagcttattggcattgcctagttcattgtatagttctggaaccttcacttctgacatagagcacctggcacatggtttacttctccagttttaccaagtttttcctagtttgtttcttactggatataggggatactaatgaaaatagggtagtactttttggtgtaccagtacctgatccaggggaactgggagagggtcaggagcaggcatgtgctgttctttgccctgcttaggaatctgtgatttcttcttgtggccactggcttttgtgctttgatatggtgtatgttcttgacatgcttagttgctttagggaaggaaaaggctgcaggccaaatctggcccactacctgttttttgtaaataaagtgttattggaacacagccacacccactcattaactttttgtccatggcccctttcgtacttcagagacaccctcgagtagctgtgacagagaccatatggctgacaaagcctaaaatatttgccgtctgcccctttacaggaaaagtttgccaaaccctgcagtaggctaattttatttttcttgctgaattttgactgtgttatttcattttcttaggaatcagaggagagagatgtagagattctgttccattacactgtcttgacatggaagttgctataatgctagtttttaaaaaaawtcatgaaatagtataaccrtcatatttcctctctcataccagtgcttgaagttacaaaaaatgctagttagattagctcagtttattttaaataagaatgattttatcctaccaggtagcctctactaataaatgaaattatttatattattcttctttaataatgtctttttttccctgaataagactaaagcagttacttaattacagtagcttttctagaagactatttaattttctaactcattttctttcatacttcttcaaaggtataagcagtttagccaaattttgaagaacattggagaaaatgaaggtggtattgataagttttccagaggctatgaatcatttggcgtccacagatgtgctgatggtggtttatactscaaagaatgggccccgggagcagaaggagtttttcttactggagattttagtaagtacttgaaagcattgaactaaatagtaatatcttattaactatttaatacatatatttcttatatttcatgtatttaaccatatgaactttaatgattacaaataaatatcagacttttcagatagagccttagaatttattaagctctttgtatggtgcagctgtttctgttataatgtgatatgtgtattcttgaaagactttatgttctgtaaaatcatgtactagaaataacaaggtttatgagaaaaatgctattaggaagacaactccaaatttacttaactttgttagcaagctctgacaaaaccaatagcaatccaggtaaaaatattggcataaagctccgctagcattcacacctggctggctggcatcatagttcttggatcctctgtatagccttatactcttttcggagtcttcagtaaaagtagatatctaatctggggtgtaacctccatcactcatttctttttttcctttaccttgttttagaacacagtgggaaatatcttgtcagcattgtcatttgcactgttaactccactagacagagttaacgctatggaaagcaaagtcaggtttctagcttagagtctggtgggaggaaggactgtaatgtaaataactgtaatacaatctactaagttttattcttgaagggtaaatacattactagaatgatgacaaggatgaaagttcagttttgaaagtggaataactggaaaaaataggccttggtaaaggttcttgatacaaggaaaaggaatatcaaaatgatcataatcctttaataccayagaatggtataatatttaaaatttgatttcactgggctcaaaagtctacatgctgtgttattcaatttttatgacgttttagaaacagcaaaactgtggggacagataacagatcattgttgtcaggggttggggtggtgggtaaaggttgattacagagggacgtgagggaatttttggggtggtgaaaatgttttatatcctgattgtggtgctggttacctgattgtatgaatttatcaacatttatagaactgtacatgtataaagaacaaattttaatgcaatgtaaattattcttcaaggaacctgacttaacagaactttgggttttatattaatatgcattgtctaagacagcactgtccaacagaaataaaatgcaagccacttacgtaattcagaaattttagtaacaatattaaaaaggtgaaaggagaacagtagagtaaaatttaataataaattatatttacctagtatataaaatattatcattttaatatttaatcaatgtaaattttattgatgagaatttcattcttttcttgtaccacatctttgaaatctgggtacagcaagtcttaattaagatggtaagttttcattgcaaatacagtaatccttcggtgtcaatggggaacttgttctacaacttctcgtggataccaaaatccaaggatgcttaagtctcttgtataaaatgatgtagtatttgcatataacctaggcacatcttcccttatactttcaatcatgtctggattatttacaatacccaatacaatgtaaatgctgtataaatatttgttatactgtattgtttatggaataatgaccagaaaaaatagactgtttaagtgttcagtacagatgcaaccatccacttttcttttccaaatattttcaatctaagattggttgaatcagtagatgtgcaacttgagggcagactgcacttaatttaaatttaagtttaataaaattttcagtttaaaagtatgttcatatacccagttttttccaaacaaaattaagaggtttccagtaactgacttgaataacacttttaaaatttaaattaataacttargataaaataaaatataaaattcagtttctaagttgcactagcctcagttcaagtgctctatcgcctcttgtagctactggcttctttactggaaagtacaggtctaaggactgaaaataattcatggtgtagtcccaaaaattagatgtgtctcgagagttgttagaaaatttcatggacacttttgtaaaagaccacgagatctgataattcagattagcttggcctgatggtaattattaaatgtattttgaggataagagactactcacttaagtcatggttgttattaatawttttttcttttacataaacacaatatttccccatcttctctaagtgactgccttgactttttgttactagaccatttagaaatctgcctataatcaaggcattctatttcactagttttcttttttaaaattccatgcagaggttgaggatattgagaatgtttaagttaaatttttatgtaaagatacccaactactataagaaccaccattaatatctgatagttgcatttggttcccccacccccatatttatgatgaaatccacttaatagtttctataaacataaaaatataggaaagggactatatgaaaactagatttgtgaactgtcataatgactattgctcatttattaaaagttgcgctgtgtgtgtttgtagaattgcatttaaaaattttatgttcttggacttaatgcttaactrttaaaagtacagtaattaaaaaaatgttttgtaaacaggaaactaaaattacctggcccatattttattgtaaaaatgtcctctgttaactttttatcccaatttacattgacttttaaaattccactctttataaagatgtattgcataatttcaaatttctccatatccttgtgataacattcatttaatgattctcaatcaacaaatatttagtaactaagggcatgaaaagcagcagatgtaatcggtgggcctttatttttattgaagagataagaaaagactacagtaaatgaaattgtgacagaaaatagttaaggacaggcagtatattgggaaacttaaatgtctaatttattttctttttttagaagaaaggatgtcttttttatgtccaaagttataggatctcaaagtctctttgtgaatgggatctcaactttttttcactaatgggctttgactttcaaaaacaaacaatttgaaaattgagagtggagcctgaattctgagccaatgatgcatttagaaggtttctttgtaaaaaaagatatacacgtgggtcagtatgactttagtgaacacagaatttttattgtgatgacaacctacgtgaaaatatactcttagataactgaactaaccatgccttaacacacacacacacacacacacacacacacacacacacmcacwcwcwcwcwmtctctctctctctctctccagggattctgtattttatttttcccttattaacataaaatccgttttttcctaataatagttgagcaaaaagaaagattttttttcttttttttttttgtgcctactgacctgagactattttagttacaggtacttagaataatcaaatataaatgctatttaagaaagaaattgcctgctgggttcagtggctaacacctataatctgtaatcctagcactttgggatgctgaggtgggaggatcattcaggtgtttgagaccatcttgggcaacagagatagaccctatctttaccagaaaataaatagataaatacaaataaaaaataaataaatcatcatgaattggtgtgtaaaataaaaaatgatgggatttagagtttgaaaacacagttgagctctctaaacaatggttcttcctctggcttgttggggataaatgtgatcataattgttttaactgcctgactggtttgctctaggtactaactagattgtgaatgtgagaaattttgtaccttaatcagtgctacagaaatgttaattggcagtattaaaaaaaaaaccctcttatttgcaaaggtctttttatttatttcagaaaattactgttaatttcaaaaggcatttgaaccttgcaaaagtaaaatagtctgttttgccaaaactaaggcagatttgccatccacattttaaaaaactagtaggaaaacagcttcactttaaatatagtacttatatttttctttatttgagagaaaataaaacaatcatttctttttcgtccagtcgtttttaaacaactagtttttttagctaacagctgccgcagcaacctagaaggatggtgtatatatattgacattcatcaggattggactcttaccactgaaaaagtctttctggttaaactagaaactagtttaaagggctgagatgaatttctaaaactttgaatcatctgcaatacagcaaagactcattctttagaaaattagatgtgatttaaaatacacttggagttttggttctcaatcatgtttattgcaggttgctaaataattgaaaataactagctgctttccagtatctagatgataataagagagaaaggcagtaaactacatatgtcaatataaaataattgggttcttatttgctataacggaaagcatttcatttaaaattactaagtctgggaggtaggcacctttcaaataacctaaatgtctatcactgatagactgaaagaaaggaaaaaagaaacaaaccttgatttttatgcctatagaaaaaggaaccactgatatttttgcagagtgggaaagatagcaagaagaagtttttaactgtttttttgggccagttttgtctataatttttttttcagttatataagttttcagtgtcataaaagccttcatatttcttaatcccacgtgctctgaaaccgtgctactcaacatgtgctctgtggaccagtgggttctgtgaactgtaatctgttttcagtgatattgtcagaaattgggaataagcatttaggaatgttgatagcaatttggcagggtcattttatttctgtagaatctaataattacaatacaaaaacttgggcttgagttttaaatattttttctttcagtttttgaataattaattttatttacataattattggtctatagtgaaattaaagttttttaagaagggtaattggtacataaccatagtctgagaaacactgatacgaaaattagcgatcattttttactggttggaagccgtttctggttcggggtataattctgataccagcttcttttggattctgtttcttcatctaatcttttttgtctctattagtcagctttcactgtggcatgacattttacaaacaactccaacattttgatggcttacaacaacaaaggcctctttcttgttcattttcgctgtagtggtcagctgtggctctcccgcaactgtcaaattcactccagaatacaggttaatggagtaaycccaatatggggagccactgatcacatgagagagagaaagagcaatgaagaaactctaggatggctctaaaaacttcagcttgtaagtaacatatgtgatttgcacttacatttcattagccaaataacatggccaagccttatgtcaatgaggcatgaaggccaaatcatcttttatggaggcttgtgatggttaatactgagtgtcaactggattggattgagggatacaaagttttaatcctgggtgtgtctgtgtgggtgttgccaaaagagattaacatttgagtcagtggactggggaaggcagatccacccttaatctggtgggcgcaatataatcagctgccagtgaatataaagcaggagaacaatttgaaaaagataagggcctagtttcccagcctacatctttctcccatgctggatgcttaaagcccttgaacgtcagactccaaattcttcagttttgggacttggagtggctctccttgctcctcagcttgcagacggcctattgtggaaccttgccattgcgtaagttaattcttaataaactcccctttatatatctatcctattagttctgtccctctaagagaaccctgactaatataaggctcatgaaaaattgggaacaataacgtatgacccatctttgtggtatacagtgtaaactttccatattttttgatattctagatatcttacagtttttgtgggaagagaattgttttggcagggtagtgatccagacagattgttgagaagatttcttgacttctgaactcagagagaccttcaaggagtcgtttgttcaatagacatttcaactccctctgggttctctgttaatgcatttttgctatgtggcttcccttcaattaagtttattggaaatttttcctagaaagcaggtttttggaggcagccttgggattctagaaactgtttattttggcaaagtgatagcgaactacaaggcacaaggctttaggtttgttaaccaaaccagtacctatgctgagaagtgacctctttgacgtatgtgaacctaaagtaagcattcagcaaacagtgttttgtagaaagttttgcagtacttcctttggctttccaacctgatttcgttgctctcaccaccttagtttattttacctaatgggttgttcactttcaatggagtatatgtrcaatggaggtttacttaaccaatctctgtttactagacatagtgaacttacttttgcttaacagatttcattgtaaatgccgctgactgattcccacagaatactgagcacaggtagtagactatagtctactacaggtatacagttctgcttctaccagttatactgtgtgtcagtttcctcccccaatcccatccatgctactttttcccattataattctatatcataattttatataaagtgatgatctatgactatgacaggaaagaaagttattgaatattgggaaaatctcagtaaggacaagttttaaaaagtattttgaattaagtatgaacttaaaaagaaaagatataaacctaattgacttttgcatgtagattattttacataaaccttttagctttcattcatttttgtccagagggagttgggaattataaacgttgcattggagatgtatgttcatataagacagatgctacaaaatccttatcagagggcccaaactttagttttatgtgacaagatgggcgaatgtatatttctatttaggttttaagttaaaataacatgtttactgttttgtgtgtgtgtgtactttattactccctcttttaactaatattttcaacatacataccaacttttggccccaattgtgctggatcatggagctttgctataatgcctaatgggattatttttactgaaaagcatctttaccttctgggattttaggagattgctgttagagaccttgtcgtgttgtaagatatatatatatatayacacatatatatatataaaactaatatatatataaaattatatatataatatataacacctaatatattatacctaatagatatcatacctaatataatatataatacctaaaatgtaatagatattttatatattaggtttttatccatggttcatggctcacaattcccatgtcccttgttacagtctttcgttaaaatgctgcgtgtgttagactttaagggtaggcctcaggaaacagaatctttcttccttcttccttccacctgctccaaagcaggactctaatctttccccacctttctgattgtggttgttaagactctaccctgagagggtcctgcctcataccctgggggaaggcatgcttccacaaaaacccaagagaactgggttccaagagcttcctgatagctgaacacattggggtggcttgcccagagagggcatagaagttgtctgccctgggccaggcgcagtggctcacgcctgtaatcccagcactttgcgaggccaaggccagcggatcacgaggtcaggagattgagaccatcctggctaacacggtgaaatcctgtctccactaaaaatacaaaaaaattagctgggcatggtggcaggtgcctgtaggcccagctactggggaggttgaggcaggagaatcgcttgaacctgggagacggaggttgcagtgagccgagatcacacccctgcactccagcctggatgacagagtgagactccgcctcaaaaaaaaaaaaaaaagatgttgtctgccctttctcccataccttaccctatgcgtgtctttgtctgtatcctttgcaatatcctttatacaaaactggtaaacgtaagtaagtgctttcctgaattctgtgagccactccagcaaactaattgaacccaaagaggggaccatgggaatcccaacttgaagttccggaggcccagacttgtgactgctgtttactggtgtggggggcagtcttggggactgagcccccaacctgtgggatctgacactgtctcctggtagattgtgtcaggattgaattggaggacacccagttggtgtctgctgcttggtggtggggagaagttcccatacctttggtcacagaagtcctcttctgtgttgatgattgttgtggtgtcagaatataggaaatacatggtttgagagagtttttcctggtatggaccttaatgctagaaagtagattttgaattgtgtaacataaatatacatttcctagcctcatattgctttttaaaaatattttgttcaaaatttatgctctgttaatacagtactttttcttaggtttcagttttggtattccacttgsagttaatgtctgtaaaattatcttgtttatggttgttctttagcagttgtctttaaattttcataattttatctatcaaattggctttgttaagctcgccatttacttacacaaagtgcattattcatattctcttatcaagttagatgttttcttagagaagtgatgttctgttttataacagtcacatctagccccaagtgtgactgagtacaacatatatcaaattttttgtatcgtgatcacaacaaaactattcattttaagttcaaattgcattattctaagaagctgtcacttatgatagacatttaaggcaacttccatttaatttgttgataatttctttcttatgccacaggtagcttatctgagtatcgttttgcattgtggagaggtttacagaaatgtggtaaatctgtcaaagctgtacagcattgtttttgctcatccaagcagttgtttcatgcaggtgaattggaattcactgattagtcttgacgcttggtctggtttattgtcaggctttgaatctgtagctctctcttcatttcagattattttcctcttttccctattactgtcttgtattctttatattttcaacccctgttgaactatttccttttaaggaaaaaaattagaggtacttttaagcttgaatagatcttgggggggcggaaaaaaaggaaacttgcttctttgtattatagcttgccagttcatcatgtaaaactatgaaagtattcattttaattatgactgccagagacccccctctcattagggactcctgaaaaaatgacttagccatcttacttgcttgtaaatcagtggcggaatcgcttcagatgtattatttagygatcaggaagctgaaaataataccacactttttttcagcaagaaggaatgaccttcaatattgatgtcattgtcttttaacaaccatggacacataagtgagttttaacccaaatyttgaaggcctgttaatactctcgctttttgtatttattttatttctttctttttcattctaatattttaaaagttgagggatattcatataacataacattcacttctttaaagtacacacttcagtggtttttactatatttttatgttgtgcaaccattattactatctagtttcagaacacttccgtcaccccaaaagaaacctcatacctgttagtagttagttctaattcccctcttcttcctaccaacccctgtcaaccaccaatctagtttctgtctctatggcttcgcctattctggacatgtcatataaatggaatcatacatctgggcttttgtgtctggcttctttcatttagcataatatttttaaagttcatctgttttgtagcatgtaacagtactctttatggccaaataaaattacactgtataggtagtccacattttgtttattcattcctcagtagatggtcatttgggttgtttctattatttcttgtgaattttactgttatgaaaatgtgtgtcaagtagtacaggctttattcagtggccgtgaaattgagaagagggagcttggctcaccaatcaacttctcgactagtgaaggttgaggggattaaaatgtagtgtttctctaatgaaggagttggacattaaaagcaaaaggaatattcacgatttttctgcaagtgggcagtgaacatttcagaactggagtgctgccttttttgtccttttatggcctcttccagtcattgtcttggcgactgtgaactgtcatggcactgatgggagtgtcatttagcatggaaatgagattataatgaagcctgaggtctttttgacgtccttcagtcggctgtcttagtcctaaccagtctcagctagtctggctacaaaggaaactgtatcataggcatcctgtttcttaaggataagcagagttagggcagggtagaaattcagctatgtcacataggcgttacactgggtaacaatatagttttgattctcttgggttgtcttggttattgatgctcttaccaaattcaatattttgctgtgttggtcatttccttatttgccctatgatcctttcactcatccttctctgccrtactctccacatttccaagccgagctcccttggcttctgcttctgttgagttggtttagtgggtagcactagtggaagactggagagtagaaggaggcggggagctggagaattctcccctcctcctttgcccactcttgcaatctagagtaaggctgtgcctcttgaagcagctgtgtcaaaagaacataaatcaccagagccatttctgattttatttgcttctaagtgacccctactttctttaaatggctacatttgtacatactattatgtatctttctgttcaaagaggaagaaaacatttttgattcatttgttcctccctcctatcttctctcctccctttttccctcccttcctcctccttttccttctctctttcagtttcttcgttctctacctcccactccttttctccccccttccctcatttccttccatccttcctttttcttagatattgctttgatcgtcttattcctcagcaagcctagttactagtgttaaaaagagagtttcaggcttacaaaaaggctctgagttcttagggaaaaaagatggtactttatttcttaattcacataaaacaagcaattaactttgtagcaattattacagacttctaaaatatcataaaacagtttatacatgattaccaatacatctaaactctagacaagtaatatcaaaggtttattctcttccttttttttctgtagttacagaatatgatcttaaaataaggtgcttactctgttaaaattgtattttcctctaaatagtgttgatattcacatgtaattcactatacatatagtttatatgtatatgatatatataggtggttgtgtgtgtgtgtttgtgtgtttcaaaaatctgtcagggttcttgatattagaagactatatgaaagatccagaatttaaattcartagcttctttctcatctacccctgctttccttcccttaagtaacagtacttattgagtctcttctgtgtgccaaatactgtgttaagtaagtcttggaaattcaagcaatgcacaagagggacaataaccttctcttctagcggaggaaatggatggtttcttcctaaccagcagtcattgcctgagcttatatattaataacattaaattgaaattttgatgttattataagtagttgtggccattatgtgatttttttggtataaaaatagatacaattttataaagatacgttaggaagtaattaccaatactttcctaatactttctaaagtcaaaaagtaactcttggaatataatttaataataattataaacaatatactccttcaggatactgttttttgaggatcgtgtttgattgcatattttttttggtaatattttatgtgtttatttttaaaccaaaactgttggactgaaagtttgaggtatatktccagagaatctgtaattgatttaaatgatacatgagaccttttttgtcaagctgatctgagctagaaaaaatctcttagaatagctgcatttagagtttaatgaaactaggcagaaaggagactaaagtgaatttcctttttagtcttttaaatgaaaaagtgcatcatttgtcctatatatcttattcatcatcagtcatagcaaagcattcattcccatgagagagataatggagtcagagccgagaggaatggaagattgtcattcaatgcagatgagttttagtaatattcttatcatgaaaaattgggttgcaaaaccttaagatttaaaattaagttgccatagatatatttaattaaaagtagattgctttaacctttctttaagttagaaataggtttaaaaaattaaatttatagttagtttgtatttaacttgtattcagtacttgcctttaataggaattctttataaagtttagtccaaaaaaggcacattttaattgaattattacaatgaacatataaagaaagtttctgaaactattttataacagtatattggatcaaaatatggttcacttttttcttgatggagaacgttaccaaacttaacaaaccaaactaaaaactgagagcaaaagggggctctgcattctcaactcctaacacctcgttagcacagctggctatatttcctggtgttttaatgttttcacctgatggggtaggtccttattcataatactgcccaatggacattgttcttctaaagttaaagcatatgaagcatgaagttattgaggttgaaaagcaaacataaacgagactgtatattgtgcacattagttggccaaattgcaaacttcccctttatgtaatcattttaggttaattagaagaaattagagggctccaaacttattctgtgattctatctaattgagcacttttaatccaaggcattaaaaataaaaatatggtgaatatagaaggatgtgttggccaactaccagtcctcactgtacttgccccagccctggctctgtatcacctggtttcagaatgtgagtgtcccttgttgtaagaagatgctgaagtctgggctgtgtaggtcatggcagttttcccacctgagaaaagccataggagaaggcatgggtaataaggtttagagcatttgccacagccccaatctatgatcacgcccttggctcctgtccgtcaactcgttacagatcccttcctctaagagttactaagtcagaagtggggttttctcttttattggtttacttttgcctaagatctacccagatgaataataatattaccttaggtgcttgattcaactgtattattttatttaaaaaattaattaattaattatttttgagacctggtcttgctctgtcacctaggaaggtgtacatgatcatggcttaatgcggcctccaactcctgggttccagcagttcttctgcctcagcttccagagtagctgagactacaggcgtgtgctatcatacgccactaatttttattattttttatagagaggagtgtcttggtatgttgcctaggctggtgtcgaactcctgggctcaagtgatcccctctccaaggcctcctcctgcctcggccttcttgggctacaggtgtgagccactgcatccaaccaactttagaattcaaactttattattttttttatgattaggtcatgctgactagcacaaagtatctcagagtaattgtacatattaaaccaaaatacattgttaaaagctaagtcgtttactataattttcatttcattttttaaaggaaaagcttttgtataaaatagtccatttttgttctcctttttcttcctcttcacagggtgaggaatcacaaattgaaatctcctgtaaatatattatcattaactggaaggaaattgcaacattatagagttgttaatcttttctcatttaagatcgagattcattcactttcagaggctgaacaagaaggcatggtcatgttaggcatacagaaaattggagtcccttgttgcaagcagatggattatcctcctctggactttattttgttttacaccttcatcatcggccatataggaagagcttcctgtgtacagtgctccacaggaagtacgataaaatgaaattttgtatgctagagctgttagcatagttcctaaaatctagtatgttcactgtgtttctttactaattcatttttgctttgtgttagtaggacttaatcatgcttacagacaatagtaatgtctagcgtaggacaataatatagcaagacaataaagggaatcataaataaaatgagacaacaatgaggaaaacagcaagatgataaagacaataaaaagtagaataaaatagaaacaaaataaagacagtcataaatggtttaacccttttattaaacaacaacagcaaaaaagaggatttccgtcatttaaatttgtgtttcatggtgacgatgctgttatggaatggcttggagttattcattctgttaggataagtgctaatgatatcccaattaattgattagcaaatgtttcataaatatattggaaaaatttactattgtagttttaaacaggcatgtacatgtaactataaaatagtgagtagttctggtaactgtttatttaatgcacatgtattgtttgctgtgtgcctgatccagtaccagagctggacaagtatctgtcttactactttttggttggtatttttgtatctagtgcttcctgtcttatttggttgatagtgttacaactgagatatagtttattcatttctttgygaagcttagtaagaggaatttagagacgaagtatgcacacacagtgttagcgctgaggggatgaacatatgactttggttggtgttgagtgtctagtggatgtcagagaacttaagtccacttcatttctggaggacccaattatttctggcaggacttcatagttgtgaagatcttactgtgctcattagaaactggggtaggcacagataaagcacatagttctctgtctctagagcattagatttataatgtttgttagtggacctattgttgcatgacttttccttagttcagctaaatacagggccttgtcacacagccacggaagattaggctcacagacaatttgaagggtgagtaaggcacagttttattgggtgaaaagggaaaaaatgggaaatagggatcctccacaaagctagaatccccgctggtgtgctttgaattgaatccctggttccacccaggaagaggaggggccgggctcctccccactgcaaacaacactaacttcccagccaaacatgccacagagcatacctctcccggggcccagactggttggagtttctctgggcaccscttccctcctggctatctcaatatggccaatgatcaagagaggctggaagaggcttagttcaaaatggtggagtggactcgcccgctagtgatgggaggctgtgtgtgagatgataacgcagggccttgcgggctattttatgaagtagttaaaagtgacaaaaacattttaatgattttgtttcaaatttaagagttcttaaaatctaatcagtagttaataaaaaacatgactatttactttgtttgactttaaacaaatggttcttacattaaagacagaaaacatgacaattgttggtggattaaatgttctttattttaacggaattgccctaatggcagtcagattcattcttgaacatgttaagcctccatataacttgccagtattttcctaaacttgggtccctgatttctgaaatgggagtgaggaaagatgtgaaaattgatggcctcaagctttttaaaatccaarttgaaacttgtactacaaagagagaagtttaacctgagagtttatgcctgtatcagcatgacatagagtagcaattgaagttttcttacaccctacagatctaataaacacattggttcatttaaaagtgattcaattttcttggattttagatttcagaaaaaaaggaacatagtctaataaattatgtcctatatgtcttataaatgtagaaatcacatatagaggtttattttagatgctactagtgtttgggcatagataatttggcattttgtgaatttttagattaatagcctattgaacattttagaatattcctttttttaaatggtgatatttaatatgttgaatggatatagtttatatacataatagtaattgcctgtgtaatttacatatagcattaaatatatatagtatatataatatttttggcatttaggacataaaagagaaaattaagatctgttttaaaatacaagtaaatacattcatgtcattcatgttttttgaaattactgtaattttgcttttaaatcttggtctacacaattggttagtgacccatagtaattgaaaagattaacaaaaggaaccacctaaatcttttgtgcattttaatcatttatattatttgctaaacacaggtataattcttattaatataatcttagtatataatggagtcttattaaaagaatactatttatgcttatttgcaaaactaaaaataaatgtttttttgggttaattgtattctttattacctgttcagttgccaagttaacttaatatcatcttcatttggcataaaaaggtgaaaatttcttttagtaaatccttgttgagtacttattctgtgggtgattctgtgttaggcgttggggtacaaagaagaataaaacttgatccctaccttcagaaagctggcagtcaagggaagaacaaatcaatatagacaaattagtaagtgctatgtataagcaaatgtattaagtgtagttagtaagtgctatggtagatgtaggtttaggctacttgtgggagttcagagggagttatcactcttaattggtgcaccagtcagctatatccactgtagtgcggagtagcacactatttccatactttgtgtaacaatagtaagcatttattttccactcatgcatctgcagatctgttagaatggctctgctttttagaggttttgatatgcttaggaaaggtgatggggtagcaagcaagattttttggtgtggaatgaagctgctggtgagtgatgagcagaatttttggaaagcattatcaaactttattgtgtaaaaggtataaagattgctgtggcagaatttttctgttttaaactccatgatgctaaatactccagactgaatggggcgtctcgatctacgatgttttgtgacgtgactacttttctttgatgctactccagactccttgatctctttttcaacgtttcatctcttttgaaccttgagcttccaccgtgctcaccttgtaaatctgtaaagtctaattttttctctgcttttgcatagcttttgggaacagtgaggaaaatcacatagagatgtgaactgctgcttctacggaatcatggccatcaacattccacagaaatcatttgcacaccccgagcctgctctttcttacattctccatggtagctatttcagtttcactgctctcctcagaatctgttattttactacctcctcatttttcattcacgtaatagttgccttgacttttcagagaaaagagaagccaccagaaaggaaaattttcgacttcccaatcattttcttaaaaatatctctatatatttatcttttccatgtgctttcaaaagttggtagaagaaattgctgtcacagatccatactttgaatcccattttcttttgcgtccttaatattgtacatctgtttgcctcttcttttcccctcagcctctccatctgctgctttctttccctctgcatataaagttgttcatcattcttcttccttaaatatattagaacgaaagacatacctctttcatttctctgtcagatttctagaatgataccatagactatcggttagaaaacctgtgtgtgcatagcaaacatgtagggagcttataaaagtaaagatccactcctggatctgattgacggatctatagtagagtatttattgttttcgaacttttaaagataaccaggttggggaaatactgtaataaatgaatatgtattaatatgggtgatgctgaccgtgtagtatgtgacaaaaggttacaaaattgtaagttaaaaaagtgtatgtatatacttttatatatattttatactatatagacacatgcatatgcatataaatacctacgtaataagaatgagaagattttatactaaggcattaataatgtagaggtggatgtggtttgcgtatgttttagtgtttttaaattttattttattttattttatttttgagtcagagtttcgctcttgttgcccaggctggagtgcaatggtgtgatctcagctcaccacaacctctgcctcccagtttcaagcgattctcctgcctcagcctccagagagctgggattacaggcatacgccaccatacacgggtaattttgtatttttaggagagatgggktttctccgtgttggtcaggctggtcttaaactcctgacctcaggtgatccacccacctcagcctcctgaagtgctgggattacaggcgtgagtcactgcgcccggccagtgtctttaaaatttatctatatattttttctatgcagaatacatccttcttttgcaataagaaacaaaaataatggtagatgttaggaccccatgtacctgcattccctattttaccttccttccctcccgcctccatataggtatcttttcttcctttatcttcctgcagtagtagatgttgtagtagatgctgtagatgactacttctagtttcttaaaattcccttctctcttactttcatattctctgtcccatttaaagaaccacaaaagcgaaacattatttttctctgccacccctaataaccaaacaattgtcttaccaaggaagtagctttcaaatgcactccttcgttttcatccccatcttcattgttgtggtttgagagaaccagttgagatgggtatcactgaagcccaaggagggggaaccaggagtttccaatgccagtgaaaatgcatgccacttgaagtctggagagaactgttgggactcgaaattttcaagtctgtggtgacctttgccagagtatttcagacacattttagcagctgaagagatatgaggaagtagagatggcagttaggaaattggtctatcaatggtaggatagccagagaatgacttggatcaaaaagagaggttttcttcattgttgttaatgttctttcagccagtgcatcaattcatcctatttgaatgctgagactaaagagcttgagggcatgtttgaaaacatcagaacattagaaaaaaaatgtacaaaagagaaaagaaaagattggaatcgctgagcgcaatggctcacgcttgtaataccagcactttgggaggccgagacagatggatcgcctgagatcaggagttcaagactagcctggccaacgtggtgaaaccctgtctctactaaaaataaaaaaattagctgggcatggtggcgggtgcttgtaatcccggctgcttgggaggctggggcaggagaaytgcttgaacctgggaggtggaggttgcagtgagctgagatcatgccattgcatgatcaaaccaaaaaacaaacaaacaaacagaagacaacaacaaaaatggaatcaaggaattagccttgaacaagagaaaaacaaacaaaaacaaaacaacaacaacaacaacaacaaaaaacttgtctttctcacggactgaaggagaggaggtaaaggtgcctgcacttatcagtgcataggtttgagagtggaaagctgagggagttcttgtctgctggctcccgttttctctgtgaaatagaaaagctgctgctgcaaggaagtagagtatacaagtttacctctctgtggagatactggaagctacttggtacaatgcatgatttttattattttcttactctatgtgtctctctggcttgctgtcattctcttttatgatacttttgttgttatcctccacaaggctataacaccaaggttaatgctaggcatgttgtaatcattaacagaacactttgttgtcatttaaggttgaatatcsagagagtagcctgagtcatgctctgtcacttacttggctggggatggtgacttatcgcagcagtgtggttgaggggatcctctgttttcacagactgatgtagctttagttctggtgtagctgctatattgacatgcctaatgttttcagggcttgcaaaaatgtactagtgagcttttctatgaaaaaaaaattccatagagaaattttgattgctaaagcatgagattccaggatggctttaattgagagggcaaacataaaatctagttaaatttctgctgtggactgagtgtttgcgtctcctcaaaattcatatgttgagccctaatctccaatgtgatggtatttgcaggcgggggctttgggaggtaattagatcttgacgggagagccctcatgaatgggattagtgcccatgtaagagaccccagagagaggattcctgtttccaccatgtgagacaacatggagacagtactctgcaagttgggaagagagctatcaagaattggaccgtgctgccaccctgatcttagacttccaaagccttcagaactgtgaaaaataaatgttttttgtttaagtgacccagtctgtggtatttgttatagcagcctgagttgtctaagacaggtattatccacatttctacccagtagatagatgctgggctgaatctagattgttgtatacgtgtcatagagggtaagagcacacacagacagaagcaggagtcagactaacatgattcaaatactggccctgtcatgtagtagctctgtgatttggtctttgttactctccctcttggagtgtattttctcatccatcaaatgaaaattgtgatactttataggacatttgaggtaatcgaattagatgtcgaatgtcaagcactaaggacaatccataactactgctactggaatcagtgtcaccaagtcttcctattttttttgttgttgtaatgattttgttatttctatcataataagactcttcatttctatatcattagttttgagatggcctttgctcaaattatttttttaaagggagtatattatttgatataaagttgttcacagctctccttcctcaaatatatatgaaatgtatatggaaaatgaaagaaaatccctccctcaattctttgtcaggtttcttaaataataacatagggcattggttaccaaacatgtgtctggatagcaaaacatttaggagccatgtgaaagtttcagatctgtgttccttataggtctcattcagagtaaaagataagttcttacatcatcatcattagcctagtttgcttaagttggtaatcacctctgaagccaccactaattaatctgggtttgagaagaggatacctattttcatttgagtaaaaagcctgttgtttatagctttgaatgttgttaagttgttctaccttggcaaaagccttgaaaatttttaatcattttttcttcatagagtcttcagctatccatcctgagtctttattctacttattgagcaagctaactattcagcattaaatttttatatatctcactatgtggtcttttcctttacggtatctccaacagaacctgattttattctagggcaaaagctcagtagaagtgaatgaataaaggctacctgacttttaaaaaaagttttattttttaacagccttattgagatataattcacatagcatacagctcaccattttaaagtgtacaatttgatggtttttagtataataaaatagttgtgcaaccattattacagttcattttagaacattttcaacgccccaaaagaaatgccataccctttagctatcatcctaccgtttccccagcactaggcaaccactgatctactttctgtgtctatgaatctgctggtgttcaatatttcatataaatggtatcatataatatgtgtttttttgtgatgtgattctttcacttagcatgtgtacaaggttccatgttgtagtgtgtattagtacttcattcctattaatgaccaaataatacttcattctattaatatacaacattttgtttattcatttagtgatgatcatttggattgttttcacattttgactattatgagtaattctactatgaacatttatgttcaagtttttgtgttgacatgtgttttcatttcaattggatatccaggttggagtggaattgctgtgtctaatggtaactctgtctttagcttttgaggaactccagagttttcaaaggggctgcactgtattatcttcccaccagtagtatataaggtttgaaatttttccatatctttgctaacacttattatccattagccatcctagtgtgcatgaagtggtatctcattgtggttttgatttgtatttgtattttcctcatgactaataatgttgaatacccttttttatgactatttttatttttatttatttatttatttatttttgagaaagagccttgctctaccacccaggctggagtgcagtggtgtgatcatggctggctgcagccttgaccttctgggctcaatcaatcctcctgccacagcctcctgagtagctaggactacaggcgtgtgccaccatgcccagctaatttgttattttttgtagagatggggtcttgttatgttgcccagggtggtcttgaattcctggcctcaagcaaccctcctgccttggcctaccaaagtgttgggattatagatgtgagccaccacacccagcccttgaatatccttttgtatgcttattgtccatttgtacatcttgttggtagaaatgtctattcagatcctttgctcattttaaaaattgggttgtcttttttattcaattgttaaatattctttttgtattctagattcacatcccctatcaaatatatgatttgaaaatattttctcccattctgtggactgccttttcactttcttgatagtgtcctttaacatgcaaaaattttaattttgaagatgtcagattatctgtttttttcatttgctacttgtactttttgtgtgatattaaagaacagagattacaaagattgccgtatgttttctagttttagttctgacatgagtcattttgagttagttttgtatatgcttcgaggcaggaatccaaatttattctttttttatgtggagatccagttgttccagaactattggttttaaagactaaagaactattggttttaaagactattctttccctcattcaatggttgaaaaccattgaaccatccttgttgaaaaccagttggccatagacacatgagtttttatctgttacattgctagctatattagaaaccattattttaactttattggtatattttcataagtggctatagggttaggagggagacctatgtaggtgctttcttgattgctgtaaaccattgccatgctcccacaccatggactgggtcaggtgggatatcttaagatagaagattgtgttttagggtatagaggagagtcactaacctcaaatacatgctgaaaccaaggaagtgatgaatcagttaagttgcagttgatagtgatatggcatgtaacagggaactacagtgtgctccctgtctaaaaagagcccccctactggcccccaaatgtttgttgaaatggatagctagctagctactgaaaacatacttgagagccattcttggcccataggatgactgttgctacttctggttatagaccatatggcattcacaattctcttacaatttcttctccttcatgctttatcctttctgtgttctttctaagcaaataatgtctcactttccagctgtaatcattagttttcctctggtttactgttactgagagattacaaaatgaaaggatagtcagrttcagaccaaaaccaaacccaagtatctgagtggatttgggctgttacaacaaagtagcacagactggatggcttctaaacaacagacgtttatttcttgcagttctggaggctggaagcctgcgatcagggtgccatcatggttgggttctggtgtgagccctctctggcgttgcaaactgttgtcttctcacagtgtattctcacatgaccaagagacagaaagagagctctctgggattcctttaatacaggtactaatcccattcatgagggctttccttcatgatttaattccttctgaaagtccctatctccaaatattaccacatttggggttaggattttaacatgaatttggggggcatacaaactttcagtccataatactaggtaaaaagagatcaataatgcaagtcacagcaaagataaatgtcattatccttagatcctaaataatgtttatttttggtcaattatagatggcatgaattgtgtgaaattggagaaattttcttttttttttttttttttgagacggagtctcgctctgtccccaggctggagtgcagtggcgtgatctcagctcactgcaagctccgcctcccgggttcacgccattctcctgcctcagcttcctgagtagctgggattacagtgcccgccaccacgcccagctaattttgtttttgcatttttagtagagacggtgtttcaccatgttagccaggatggtctcgatctcctcatctcatgatccacccgcctcggcctcccaaagcgctgggtttacgggcgtgagccactgcacccagccgaaaattgggtaacatttcaaactcacttgtcatggtagtatttaatatactgttagcttgcagccggtcaagtaaactgaaaataaatggagaatttgaatgaaatgaaattacatattttcaaggatctgtggaacgtctacaaagatagattatacactggagcactttttagaactgagttccatgtggtgggctctgagagggagggtaagaaatgaggagaaagcgcggccagatagaggcatttcagccagatcwgctctgtttttatatgctttgcatagttttagtgttggagttctccataaaatctattttgagataattgaatggtttctactcctgcaagtaaataggttggtaaataagtaaatagtttgattgcccctgtattgagctacaaagtaagcctcctgacgaacttcatttcaataaaactggaaattaatgaaaaaatcttaaggaaaatataatacccaccatacagtttttcacaagcaacaatagcattggagagaataatcagagttacaattatagtctgttttgaaaagaaatgaaaactgtatcgaaagctattggttacagctagaacaataatgaaagattctgcatctgatccacagaacacagaaaattatttgagtgcctattttccaaattatcccaaggaccatatgtaactaatacaattctagatgcactgaagggaagttaatttattgcatacaatggattcttaacacattagggcttaattctcttagtgaaccctgattgatcaaggcaggcataccctgttattaagatgataattcccagagttgatgaggttatgggtrgttgaatatcctcatatccagctgattggagtatgaatggaaactacctatccagaaagtagtttgttaatctgtattcagaaccataagtgtattaaaccttatgccctgtgctttataatatcactttttataattgatagcaagaaaagagatttggacacctatttgtgcacagagacctcataacattcatttttatttttttattacagaaatattttactctgtagaataatagagataaggttctatattcttttcacccagctttgacacttatcaatatttagctagtgttgtttcatctgttcccttgcccgatgtacattagttgttttgcttttcataatttaaaccaaacttcaggcaatgtacaatttcgtcattaatacttttttgtggaattcctactatcagtagatgtttttggtaacataataactcttatcatccttattaaaattatcaatactttctttatattcagtctagagtcagattgcctgatatgctactattgatatgcaattacattcatttattcccacatatttatattttaagggcttttcttattttttcttctttttaacttattaagttttcccattttatgaattatttacatggttttgtagtcaaaatataatgagtacaatcctggaagactactaatctgtgcattttcttctcatattcagaataatttctatgcattctttgctgtattttgtgcttttggaaatcataaacaagaatatttatcaatccctttcttacatgagaagaatcatagtataaatactgtttcttgatgaaacattgttaaaattacaagcaatgaggtatatccatttatcatcccctttgttacatagaaagtaccataatgtaaatactgttttagaaataaagacacatacttttatttaaaaccacagttttttgataataaaactattttctcccataaatsccttaaataacaatttagtaagtgaagctctaggtcttagtcatatgctgcatgacattttggttgatgagggactgcgtgtacaaaggtggtcccataggattataatactttactttgacttcacctttttaatgtttagatactcagatattccattgtgatacagctgcttacagtattcattacaataacatgtcatacaggtttgtagtctaggaacaataagttataccatacagccaaggtgtgtagtaggctatgccatgtaggccggcataagtatattctataatgtttacaccataatgatattacctaatgacacatttctcagaatgtatccccatttttaagtaatgaacaaatgactgtatttgatttattttctaatttccagaaagctagatatacatgattgagcactatgtttgtttaaataatgaggtattagtattccattggttctgaatttagtggcactctgatatactttagagattgttcttgaaaaccacacctaagctaaactaatatgtgttaagagtagtttccccaaggtaatagtgatagggaggggaagtgtcttactaaggtccttcccagggtactagctgccagtagaagttgaagaagggtgattcctttgcacccaactgagaggaggaagaattatctggaggggaagagagaaaatcaaacagcacagggcaatatgtcagaaaggactactgtcagtcaccccccagacactgagtggttctctcataatcctgggtaagaacaatgccataggaaattccagctctatactttatgacaagattcttccttgatacaagttaagtagccaaacttcaatctttataagcctttgcattataatttcttatacattctgcatgatacaaagtaattaaatgacatcatatgatgaggaaggatgtttccttgctccaaagtggtgatattccagatatttaacaactgttttgacccgaggatatcctttcagatgggatgggattgatatctgccatatgggctagtactgactttatattagcctttgtatattagcctcgcctattgcatttgccagacatcttgcctcactgcttgtctgggtgtggcagggattggcccaagtgcaaaccaaactctttagcacattggaatcttcctgaaaaatggaaggccctacatactaaattggaaccttttcagccatgtttaaggaaamtttatattaaactcaaaaacgctgcagaaatgaagtggctaagtgctgatgaagagtagtgctccactgtgaatcaaagagtttgggaatgtttgaaggaggctgacatttgagaattttatgtgaggattagtacatttgaaaaggaaaggttgttgggtatgagataaacatagagtttgtgtgcctgayacagtgaccttagttaatgtttgatcacctttgccgaatgtgtgtttgcagttcatattaaactgtgcatcacactgtttcttttccatatctcgatttaaattttgtcagcttgttttgagtctgtggacaaatagaatcttatgccttatcagatatgatgaatttaaacctgttaataaaatacctattaaaatatttgctttagaaatatatcaggttttccaccatggcacatgtatacctatgtaacaaacctgcacgttctgcacatgtatcccagcacttaagtaaaataaaaaagaaaataaagaaaaatacagaaggccaaaaaaaattaattattgtaaattagctctgtaagaccttctttagtaagagatgttcaaatactatgtttatatacattatatttttattttaaaagagtaattagtacatattaattgccgagtgattcctagaaatattttattttaatttataattaaaatctacctttattccagacttaagactgcaaattaaaatacgctggactccaagaatgccacttagtcacaatgtaaacaaaaacattaatatgccaycccaaaagtttctatcaagagaaactagacaagcataagagtatcagaatcctttctacattcttggaggttcctaaatgttgctccaagactatacagctgacctgtgaacactgtgggggctaggcgtgcctactccccacatactcaaaagtttgagtataaattttgactcccccaaaacgtaactactaatatgctgctgttgacaagaagccttaccaataacatacagttgattagcatttattttatacattatatgtattatatactgtgttcttacaactaagtaagctagagaaaagaaaatgttattaagaaaatcataagaaacagaaaatatatttactattcattaagtgaaagtggatcatcataaagatctttatatttgtttacatttatctcaattgtaaatagtgcctgtatggtctttatttgtatacctaagttttaatacattttaacattttatcattaaaacagagaactgtatcaggttttctttacttgataaacatcaaatgttttagcagatgttgtaataaaataatttatgcgtataggaaacatgttcttaaaattttgccaaaactgaaataataagcacacattgttttgggggtacctaactttgagcctagcaatatctaggttatggtagataatgaagagtagacaggaatatgagttaatattgttaacatttaaaaggtttaatatcacttttctatgggaaaaataaacctttaaatttttattcattttgttatcagttgcttatactttttaaccaagcaatgtttcggtgtgaatatcatagagaatattatctgtagacactaataatagtatattcaataatggttttaacgcatgttgtcttctcatgttctgattatcatttctattccctcacattaatacatttaaattccttgatctctgagattgtgtgtttaatctgattctcactggtcatccttcctgggctttacaaccccagtcaatcctaaatcttaaatcctatatttcatgtgattaacactagcctcaaaggattatttatgacatttttgatttcagaagtcccttgacctgttgatatattatattatttgatagccttttagtttaacttcatctagaaaattactcacaaaactgttaagtagagaacacgcaaacacatcaatttaactagggcagttgtttctaaagtgtagtccctggtttctaaagttgaggccactggcatcaacatcacctatgacctttttagaaatgcaaattattaggcctcaccaaagatctttataaaaaactctaggactgggacccagcaatctgtattttaacaaatccatgtgattctcatgtaaactatagtttgagaacccactgacctagatagagacctttctagttctatgtgtagttctatgcttggtagagaagcaaatgattgtcacacatgatgaagagtcatgtttatttccatcctcaggtctgcatagcaatgcaaactctttgcattacataattaattctctctcatgtactcagcataagttgtgtaggattaaatgaaaaaaagtttgagtaacctgatttttttataaatatgtctttagataggctctgatatggcttggtactatttattattattaatattattactttattttcaattatattctgtagtagagtcacatgacttatttcacaagacatgcatttccctaaaatgtgtctaccagcttatattattttgccttctgtgtttttctaaatcaaattttacttaaaatcaattttcagtattttataccaataatttgaggttgaattttatgtatttatttttaactgtgtgcttccatgattggttcctgcaattacacctggatacaccttaatgatagttccttctttcttagctaagtgtttaatgttaagtttataagcacagatccaaatccaatgattttcctgattattctgtttctggatattaagatatgtgtattctgtggagtaaagctgtttttattagatattttgagaaactcatataaggcaggaactggttttattggaaaaaatcctttgtgtgatgtagtgtggtagaagtggatattytggttggtgcccatgtttttaatggaaagaagaaacactaataaaggaatgagaaagaggagaatttagggcttagcaatgattggagaaagagccaaggagatggaaaaactgatggtggggtagctgaagagggatttatttggagagaaaacggactaatggaaaagtcttaaatagtttcatacatrtatgcttgcagaccttctttctctcccatatgaaatctttagtatgctctacatagtttatgatggctaatgtactggatttttttgggtgggggtaaatattgtaaagattttctaagtcttgctttaaagatttgtgtttggcaagaaaagagtacctgcagygaaagccaacacctgagttcccatgaggaaaggggcattactaaaatgaaactcttgaagatgcaaagaaaaaaagttttttacagtgtataattacaagtaatcagcatgtgctttggagttttatataattaaactattataaaagaaaaatgcgacatagttaaagtatttttctttatcaaatattaatactttgcttatttaaataatcttgaaacaatagttgataccaagctaaagaactagttcatcaattttcaaaaactgatattggaaaccattttcacagtgctgaaaacagctcttacaaataaatctgcatatctaaatttcacatatcattgaatttcactttcaaaatatccaaatcttttaataaattttttagtggattcaccattgtacattttctcatttatattggtctattataactcaatttaaccttttctttatgagatatgacgaatttagagcactaaatttggtttggcattgaacagggcctgcattaagcacggagtacatatttaatgaatgaatgaatgaactaacgaactataccctttattttcagttctacctaaccgggaaaagatctgctgcttgtcttaagtgattagctaaaaagaaatgcaggaatcatatagtgttctagtacctagatttttatattccaagcttttattattattttttctctaattatggactaaactctttgttttggtaatggaatgtcacagcatgtatagrtgagatgtatttgaggtttttaggtgaagaggagtatagcagcaccaaacttgtagagctgcccttgaagataaactgctgttagacattttcaggttgtcttcatgatggagaataggtaactgtttagaagaacctttatttaaatcttatttcttactcctgttttacccccggtattcagactggctgagagagaagagtgaaatatgtaatggaagaaaaaatggcataaaatkagtttcctgattattcctttattatgtccttagttgagaatgtaatgtcttagcgacccagtatatgccacaaggctgcttgattttttgttaatgccatgaaatattttaggcataarcaaatagtaaataatgtaataaacatctatgtgtatacaactcactttaacaaaaaataatacagatattattgaagcttcttgtgttccctttcttctacccacagggaatcaccatagaatttggtatttcatattcatatttctgatttaatatttttactacatacctatgtatcaataagtttcatataatgttttgatagttcttgatcttgatataaatgctattcttctgtactcttttaaaattaacttttgtgtgtgggatatttgcatatgttggtactataatccattcattttataccattgtatagcatccagttgtttaattatactacaaggttttacccatattgtggctgttgaaattttgatagcttccagttttttggctatgacaaaagattcttcagggaataattttgaatgccttcttgtgtacatttaggagaatttctctgaactatttcctaggagctgaattgtcgggctgtggggttaagatatcttcaatttcgcatcacatatgataccaagttgtttttaccaatgataccctcagcagcaatgttttatatcgttgctgactagatgatatttttaaacttttaatttttgccaatgtcctgagtgcgaaatgatatcttattgttgttttaatttgtgattgattaaacagtgagcttgagtatcattacatgtttattggccattcaagtgtcctctcctgaatatattttttatcaatttttctcttgatttgttttctttgtctcattgacttacaatgttcttcatgtattatggatgctctctctcttttggtatattcactacaaatgtattctcccaatttatagcttgtcttgtcattctatcgattcatctatttatgatgacaagtttatagttttaatggtcagaattatcagtcttaaaagttttatagttttaaaaacattttacttaaagaaccttttatactccaatattgtaaatatatttctctgtattttcttctaagcattttatggttctgcctatcatgtataagtattaatccatgttcaaatgatttggggacatactagttggtggagatctattttattttattttcataaggataaccaatttttccagcaccacttattaaatagtgtgtcctttactcactggtttttaatgcctcccttatgatacgttaagtgtcgtgtgtgtgagtctgctcttgttggttttactttcttccacgttctgcattccaccttttctttacttcctatactttatataaccttctacctttcttgcttaaggcatttctttagattttatgtcagctctgtcacactcttatgaaattcagtaaatgttatatgattttaatggtttgtcattatttttctaccatggcatgtacatttgtttgttcataatatgtctctttgttgatggtgttttctaaaaaaaggatccatcattttcttttgcattctgtttattgacagaagtattagagttgaaaccacaactgaaaatgttatagtcttaatttaattataaaatgcaaaagcacactttaaaatgcattttttataaataaattaagaataacctgccttttctaaaccactagtattttgattaacacttcagaaaacrattattttagacaatttgattttttgtgcaagtaaagcagtattttgtttttcttgaaattcattaactattagtcctatcatgctgttgttaactgatcttcttcatttttttagatggttggaatccattttcgtacccatayaaaaaactggattatggaaaatgggagctgtatatcccaccaaagcagaataaatctgtactcgtgcctcatggatccaaattaaaggtactttcctccctcctattttttcttgaacttaycattttctttttatcttktttgccaagtttgatttaaactattagaatgtacaactgatgcatgataattgtgggagaaacagtctaaatgtacaaatagagggaaatttaggaggaagtcttgagttgaactgggttagattagaattgtttggctggtaaggaaccaaacttagttgtattattatcacaagtttggaaacattatataagaaatgatatattaaaagtgattttgagtaattgtaaaactttagcttgggaaacggaaagtttaatggaaaaatgaaacctgtcttcaaatcagccaatgtagagaggatttttatctgtaaagaggtcgggtgaaattgatgtgggaggggatgctgtgttggacgcgcatgcattttggagactgcttcttctgcttcttcctctttctggcctctgacatgctggtggtatggtcttgtttatcatattcttctgtgataaagccacctgaattagcccaggggtctccctgttggaggcaggctgagcgtcytccacactccctctgctttcgttgaccatgtggttttgcattcaaggtctgcagagcagttagagtcggctgctcttgtctcatcaagggatgtctgaaggatgggttccaaagtctggattacagatttaaggcatttgattataagagmagcgatctaaatcttttcacacttacttgattttactccatggtcatataattatataatatttccatgtcccttgtgtcttccttccttagacatttaccatgataaatcctatgattgagttgtttttattggtatttgttatttaacaatattaactcagagttacttaaatatattaaatcaaaatgcacagtatgtttattttgtaggttgttaaaaatattttataaataatgaaattataagtgtatgtaaaatttaataagatattgccacacattataatagtaagcagagaagaatattgtttgggataagaagatgtttagcaagagatggcagtcaaggttccttttaatctatagtgaaaaagagaaaaatactgacagtatacaataagaggaattaaaatttaatataaataatcccctttccatgtcagtataagctccatgagagcatggcctttgctgtgtgtgtgtgtgttttttttttcctactcctgtatactctcaattctttgaacagtgcctggcagagtagacactcaaaagatatttattgagtgttaaagccattttgagactcagtctttgaagaagtaaatcaaataatttgattcttcgatagtttataagggctaattttatagaaactgtggcaaggcaactattattgttttcattgctgctttaagtcttaatggctgtttttttaacctttgttttaggttcggaactttttttgagaactgaacttactactttttaaaaagtgttgcaggaattttttctgcctgtttcctttttatttttttgagataattggcagattaactttactgagtttttacttgttacaatcaattaactaagagaactaatctaaatagcaaacagctccttggcaccagctgcagctgtgaaatctctgaattccttgattctgtgaccctcaaatgttctagttgaagccgaggaaagttcccaatcatagtggagctttggttgcagggttacactacagtctatcacctcataaggttgatttttagctgccgagttctatttattcatattttcactagttcaacaaatatgtgttgagtatcttctgtgtacctggtactgtaatatgcatagggaatcagaattttaaaaattactgcctttaaggaaataatctaataaatgagttatttttaatttttatctgctccaataagcctaagagctaggacacagtccactcagtagaagcagcttcctgtggaagtaactatcaagctaaggagctaggtgtgtggaagaggcaggatgggctgtttcaagtttttaaatttgaaaaacagattttccttcttttggtggagaatcactgtaataaacataactaaatagacataaagctcctttccctctcaaagagggctctgtatgattatattattaaacactcattacctcattactagacccagcatcatctattaaaagataagaataaacagctcatcgatttttttgctttgttagctcaagtaggaggcatgaaaaataccaacataagcagctaccacttactgaatgtttcccattgacagctaactaatttacatatattttgtcattgactcattacaagaactcgatacagtaagtacttttattactggctcaccctacattctgctttgcctgaacagtaccagtgtatacctgttatcttaattattattatttttgattaatatagctttattttcattttttattttgattttactttaagttctgggatacacatgcagaacgtgcaggtttgttacatagatatacgtgtgccatggtggtttgctgtacctactgacccgttctctgagttccctcccttcacccccaccccacaacaggccctggtgtgtgttgttctcctccccgtgtattctcattgttcaactcccatttatgagtgagaacatgcagtgtgtggttttctgttcctgtgttagtttgctgagaatgatggcttccagcttcatctatgtccctgcaaaggatatgatctcatttctttttatggctgcatagtattccgtggtgtgtatgtaccacattttctttatccagtttatcattgatgggcattagggttggttccatgtctttgccattgtaaatagtgttgcaataaacatatatgaccatgtgtctttagagtagaatgatttccctgatgaacatcaatgcaaaagtcctcaataaaatacgggcaaaccgaatccagcagcacatcagaaaagcttatccatcaagatcaagttagtttcatccccgggatgcaaggctggttcaacatatgcaaatcaactaatgtaatccatcacataaacagaaccaaggacaaaaaccacatgatgatctcagtagatgcagaaaagacttttgataaaattcaacatcccttcatgttaaaaactctcaataaaataagcattgataaaccatacctagaaataataagagctatttatgacaaacccacaactaatatcatattgaatgggcaaaagctagaagcattccctttgaaaactgatacaagacaaggattccctctcttaccactcctattcaacatagtattagaacttctggccagggcaatcaggcaagagaaagaaataaagggtattcaaaaaggaagagaggaagtcaaattgtctctgtttgcagatgacatgtttctatatttacaaaaccccatcatctcagccccaaaactcctttagctgataagcaacttcagtggagtctcaggatacaaaatcaatgtgcgaaaatcacaagcattcctttacaccagcaatagacaagcagagagccaaatcatgaatgaactcccattcacaattgctacaaagagaataaaatacctagaaatacagttaacaagggatgtgaaggacctcttcaacgagagcaacaaaccactgctcaaggaaataagagaattttaataatcattgtaagaaatgagtagcattctgtctctagttcagaataatattaaattttaattttcaaataacaatcagaaggtacaaattttagtagctgacatctgtcatctctaaacctatttttcaaaatctaaatactataagtcttttgtcacatttttattctacaattgagctctctaaaggagctggaacagctttcattttattattgtagatcatgatatttttcatagatttaactgtgctttttaggcaattaaaatcataaggctaaaataaacacataatttagagtttttccttaaaattattttctagataagttctgtatttgagtagatcatttatgtgtcacattgatatgtttgtggcagtgaagttatatctccctcttttggaaagccaaggcatggcattttggttgagtttaaattgttcttttcatattttcagtttacatagtttcctgaacttacagattgaaaaataatatttttctctggaatagattttcctttgaaattttttacattaataaaaagttaaactttcatacatatatgcacatgtatatttctttggatgtgtggaaaacaacaggacatttgacatgtgtttcaacccaggaaaactttttattttgatatttgaaatgcctttatttttagttgaagagagtcagttttactttttctgtaattatgcaacatgattcataatgtctgtttaaaaaataggacttaatttaaaaaatatggaaagaaaagtagcccttcttataatcattaatggcctggccctccaggctaccatccactcttgacagattttatgggtattcttgctcatcagtttttaggcatttgtaaactgtccttgcccttgtcctctgcctccctgtatttatatgctttttattatcataaaaatatgattatactgtgcctattagtcttcagtttgctgcacccctcctaatatatcatgcaaatctcaaaaggtacattattatgttagttacttgaagaatcaagtccatacccattactaataagagtgatgtctacaaggtataaattagcatttattctggctaagcattcgactttgatatgaatattataaaaagaaataaaatgtattaatatactcattctagatcactcaagtctgtttcttataatagctaacataattttataacaattgtatgctttcttgaggtattaaaatcagggctgcaccttcattaccactgcttagaagaacaaaatgttmattttctaccctccctgcttcctgcatttgggtcatagaagtgctctgaatttaccctgtaaattgttcaacaatgttgagtgttttgcgggatgtggtttttgttttttctgtgtactcctttgtaactttgcctacagattataaagaagtgcttgagatttaaaatttaaaattaaccattaacatatcccaagaagaccacttatatgtaatgtagaaagaaaatgtttacaagagctaacagtaggttattttagtttaacaagtctcatgtctttttttttttttttttgagacggagtctcgctgtgtcccccaggctggagtgcagtggcgcaatctcggctcactgcaagctctgcctcccgggttcacgccattctcctgcctcagcctctcgagcagctgggactacaggcgcccgccaccacgcccggctaatttttttttgtatttttagtagagacggggtttcactgtgttagccaggatggtctcgatcttctgagctcgtgatccgcccgcctcagcctcccaaagtgctgggattacaagcgtgagccaccacgcccggccaacaaatctcatgtctaacatcaatctagtaattttcatttgtttaattttcataaattacttaaagaacttatttaatcagcatttctaagaggttagaaacactacttcaacccacagaaattaaatggatgtgtagtataatatatgtgaatatatgtgtgtatatataaatgtgtattactattatgaaacactgttgcaaacttcctttgaattaaaaaattctctcagaataggcattatttcatatacaaactagaatgtaatgaaataatataaattgaagaatatacaggtgatggcttttgtttgttgcctttgtaaataacaatgccattgacatttgcatacttatattaaacaaggtttactctgtcattatgctaaatatagttagtttgtgattgccaattctatgtcattgacttaagaagtcacatttacagtcatgttgagaggtttgaagtgataataataatgaaataataatccgtaatgttttgcactggtaattacagtgggtgatttttgcaaatatctgttcatgtgaatagaactataagcaatctcatgaacacattgttctcagctgagcagcacctctttccatttgatcctgagacatgaactcattttaaaattaataatgagttattatataaaaataattttaacatctgaagaaattttgttggttttctttttcttttcaaaatgttggggcgttttaggcccagctgctctcaggtttggacatatctgtactatttgtcttcgtagtgctggcaggtttttttttttttttttttgacacattcaagttttctatttttgccatttaattttccaggctctgtcatttccttaccattctttaagccttcaatccaggttctgcctccagctttgctcatgtgaaccttattccacttcttctctcaaacttattttgattccaaactttctgatattccagatgtgttgtgttcttctgaaatgaggtcctaggttaagtcaaattatgttcttcttatttttcataaaaagagtactgcttctcatcttagttgaaatacagattgaccctcctcttcatcctctctgcccctagcattcctaggtattgccaacttctgtgtctttttgcataactgtaataaactctgcttataaaaaataaattttaaaatttgaattttgaaaccaaatgcacggagaaaatatttttttttctatgcacagcccctttttatgattatttctcatgaaaaagctgattccgaatgtgcacataattatgtgtaggaaggtacaaatggaaattattagtgtcatgaactaattaatgatgacattgaaatgggaaaggttcccttgtcccctcacagggcgcgcgatgggggtgtggctcactacttcagtgccccgctgctcaaacctctgcgagaactcacagacgggcaggctgtggggctccaaccccacggcagtgcctgggggtgaatgtttacagctcatgaagccccagtgggcgtgtgctaccgtgtgcttttagtttgctgtctatatgctgcttgtgttaaccagctcaattagaccctctgccctgtcacaaggacagagggttttctgtatcccgggttcttgccttggtatactggaagaataggatcacatctgggcttggagaatgaatgcaaggttttatcgagtggaagtagctctctgctgatggcagagctagtagggaggtggttttcccctggagttgggcccttcagtggctctggctctcctcagattgccccggccaaactctgtcttgtcccaccagtatatggcctgcgggcatgctgatgtctgttagggtgctcttcagctggcgtgccccctccgcgtcctcctgccttccagctgcttacgctgatgtggtcctctcgacgtctggccacctatgtgtctgcccactggggtcttgggtttttataggcccatgatsgttcctggcgggccagggtggtattggaaaatgcaacatttcggctggaagggcaggagtgcttgtcctcacctaggtccatgagagtggagccctagccagggacccagctttctctacccagcacttcccttccctcttctgtattatttaaagggaccatacttttcccttcctagcacttccatatcagctcgataattatctttgagttttccactctttgtgactatgtagataatggattttattacattaagcatcactctgcattctcaggcaaaaccaattgatccctatatgatctacctcacgtacttgcttcttccttccgtttcttatatgagttcattaaccatgttgaaatctagctgcaagagagggagaaaaatgtgatttttaagctttccatgttctctaatacaaggaaagaaagcagaaaggcagtttgactgactaaagagccattatctgctacaattttaaaataaaaattatgtattgagaagaaaagtatcaagttttagtaatggcatttaaagtaacattggtaactttcattttcttttttctttttttttttttttacaaaactgttaatgtttggcaaaatgattgatgtgatgcatagtatggaaattgcaaaatttaaaaaatattgatgggttagaacaacagggtaagatcagaggcttgagtaaatttaccagactcttttatgacagcattcccaagtatagtggaaactttttcataagtaaatgatgtgagtttaaggacaatcataggtatgctcaggaccaccgatggataaatttctgagccagcatggaagccttcaatgatttgagtgagattaacttaagtttataaagatatttaaattttattatttgagaataataaaatagcaggaagggccgggtacggtggctcacacctgtaatcccagcactttgggaagccgaggcgggtggatcacttgaggtggggagtttgagatcagcctgaccaacatagagaaaacaggtctctgtaaaaatacaaaaattagccgggtgtggtggggaatgcctgtaatcccagctagtcggtaggttgaggcaggagaatcgcttgaacccgggaggcggaggttgcggtgagccgagattgtgccattgcactccagcctgggcaacaagggcgaaacttcgtctaaaaataaataaataaaattaaaaaaatgaataaattagtaggaagattaggcaatgaaggattaaatataattgtaaatttttgttaaaacataaatatatttaaaatgcaaagtagagattgagacaaattttattgtgaaatatttctgatttgcaaaagtattattaccagggttttaggaaatatattccctgtaacctgatgttttctttcctttatgataatttattattattattttttaaaaataaagatctatcattttgttactggaacactggtacttgtagctactctgtcttttaccttctcaggtctagcttttatctcctaaagcattagactgcaggtcacaaaatctgaatcaagaacaattggtaggatggtggcagtggttagaaatcagtctaaggcatctttaagatattcctcaggagttcctactgcttttcagggttgaaaactgctgtccaagatacatataaaagcctaatattttcttactgaattaaaggggaaaatgtttgtattccaggcacgtcggagtatacaaatcaatctcaacaagtgtttaatgcgacaggtggttgtgggatacattttagaaaaataattataaaaarcattctttttctctgttttatttaatgcttgtacaaatgaatcaccattatctaaaaaattatactgtccataaagttctgtttcctgattgatcccttaatgtaaacattgattccatagatattttaaatgtattagcaagcttacttttcttgtatctgtgtactgtgaaatatgttgtattttatcatctttttttctttcttccttcaatgtgggcatagtatattttaaatatgattataaaatctggaaaattgaacactttctcacattttttttagaaatactttttttaaaaaataaaaatgtttcatgcttttttcttctaaattatgtagtcatccaattttttttcaagagagcttttgtttggtatttgatcttttattggtgtgccagaaaaaggaagaaaattacagtttgtgactgtttaggtgggcattatttttggttatgtttaataaaagtatttgcactttgaccaagtataccttcaaataatgatgaataaaggtatgcctacaggaaataacctttttctcctgataaagtacatactatacaatctcattcatgatttaaacatttacatttaagctgggttcttttattgaatatcacagttaagtttttgttaaatgtcaaaattaatgtttaactttcttcaatttaaagtgtgtggttcagtgtatgtgtgtgtgtttttttttgcacttcagtatgttcatctttatccatcctaatatgtcagtagcattacatttccccacgtgactagtgctcaaattgaaaattatatgttctcatgaacatataattttttttaaatggtcagccataggtcactgcgtctcatcttacgaatattccccatgcctcactcattggtcaggtgagtaattcccagacctgtgctttattgactgaattatattcactagtttattcagtagttttctctacttttccagaggagttgtcacatttagagatcaagctcaaagtttgctgccttgtgccttggctttatctacacaagatgggggcatttatgtttaaatatttagatatatctgaacaaggaaggatgaaagtagcaagcttcattgtgtagaatcctattatttaccactgtttcttcccatcatcactgtttccacctctagtgcctgagtccattatccaaaggtcactccaattcttgaccatcttttataacctactggaatgctgttaaaaaaatcaattgacaagaaattatccaaatgcatatctagtgctacttcttactgatagtcattatctctttcccataatacaaactatttcatcgctttcttatttcttgatggttgtatttactttcatcattgtacatacatatctatttccagttctttttactctaaaatcacctatacctggcaaaatacagattttttgtagaagaaaggagagaaaagaatgatagtgttccaacctgtgagaccttaatttgtaaagaatatttaaagattcaagaggaattcatctcatcattaactgtttatttaatagtcattaactatattcttggatgtaatagtcttaatgtttattgaatatgtaattgtatgttttcttaaaagatcctataatttttagaattatgtattctgtgtgtagtcttcggaatttctctagatttcttttaggggttgagttatttcttttttttccctccatgctttatattttacttcattgcaatggcacttagaatgattgcttaggggccgggtgcggtggctcatacctgtcatcacagcactttgggaggccgaggtgggcggataactagctcaggagtttgagatcaacctggccaatatggtgaaaccccatctctactaaaaatacaaaaaaaaaaaaaaaaaaattagccgggcgtggtggcatgcacctgtagtcccagctacttgggaggctgagacagaagaatcccttgaacctgggaggtggaggttgcagtgaggcgagatcacgccactgcactccagcctgggtgacagactgagactgtctaaaaaaaaataaaaaaaaaataaaaaaagaatgattgcttaggaatcatatttttttcttcaaatgattgaatttattaccacatagacttttgtaattatacttaataaaatatttttaaaagaacttcaactcatcctatgatagtgcttcccctatcctatcacttctgaaaatacttcttagatttttttttattggctttataccagattataactctgtttacttaatagaattctaaccttcactgcacatggatgagtctctttgaagcacactctttcagtaatgaaaactcactgattttttccccttttcatagcctttttcttttattacgatattgatctttcaatatcttggatgtttaaatcccatatttttgtatcatgtgtaattcatttgttttctagtctaagacacctaatcaatctttacatgattacaacatctcagcattgttccttttcttttcacttaggagtgtttattctcacttgttcagggatatcgttttcaatgcctgcttcgtaaatctcaaataatccctttggactttgtctttttgtagtgacctcactttgtaaggtttttgttcaggtaatgtacttgaaatgaagcaaacactttatcagtcctacttagttgtttctttatttctttaaagatttgcctcggtagaaaagcagagaaagaaaaccatattacaattgtaatactccttaactaggctagaagataggggaactagggtataaaccttgggggataatactcctttttataggtgcagaagcttctgtctctctaaatcrttctaagtcaggacctggtttcagaagtgactactgacctttatttactttcacaatattctgcagtttcttctttctcatgtgtaagtattacagaaatgagattgtaatatatttataattctctaattggtgttgtcagggacaaagaagctatgtgtattatacctcaaaaatagtctttttttttgttctatacattggtgtctgttatcccaaagttttgtataaactggtctgacactcatttgtatcacattacagatttatttttcatagctaatatactcagtcttttcctttaatgaagttttaaaattatgatttgttagtatttatttttgttagagaaaccctttgtcctattcaagctgttgctatggattcaaccttggaaaggtttcttgttttttattaaagaaaaaaaatacattatgatggcatgttttaaaataagaaatctaaaataatggtatctagtgaaatttgatctataggttattgctttagaagtttaactaatttctatccttttttagttaagctactagccaggatatcttcttttctcctgtgtagtgtccagtcttgcataatataagagctcaggggcaaaatctaatcatttaatctctctctatccacctctctcaattcctgaacattgtagatgtaaagagcctcacaaggatgattttatatgcatatgtcttatataagtttatttgattaattgaaaactatgaactaaattatgaggcaaagaaagagatttctaaaatatatgaactttattatccagataaaattaacagaaaattaaaataatttcaagaaaacagttatgtttatttggtacccatagcaggcttaattaaataatatataatgtcatttrtagcctaaatattaccctaatttatataatcttaccgattaactatgtacagttttagaaaaattcacccaggaagtggtcttttatatattaaggtctgtttaattttagtgatctctttattttaattccccattaatagaaatataaactcaaagttcacaatgaactagcagttacgatgaagagtgtttctgattttcatcttcctagttaggaaattcagaatgcaattttttcaatagatttttttttttgttcactgattatctgtttacttaaatagtttcatctctgtttaatgaagcaaatatgtcaggtattgggtaggaaaaaatattccctttgcttttccatatggtaaatttagaggcttcatttacatcacgtatgcagtgattgtttttgtctaatctttgaaaatacttacgtgggaagaaggctaggtataaaaactgtgtattacaaatttattgtttttttttgtttttttttttttttttttgagacggctggagtgcagtggcgtggtctcggctcactgcaacctctgcctgaaaggttcaagcaattctcctgtttcagcctcccgagtagctggaactacaggcacctgctaccacgcctggctaatttttgtatttttagtagagacggcgtttctccatatggatcaggctggtctggaacttctgacctcaggtgatccacctgccttgacctcccaaattgctttgattacaagcgtgagccacacacccgggcacaaattcacatttttaaagtcccttctctcaagtctggaactcagcaatgtttattttgaaggagtttgctttacctgggaatcgtcaaggagacttaccttgtttagtgaagttcactgtaacgtattagtacatatttgtctactttttgggagtaagaacacaagacaaatgtattatttagactactcatgaagataacttatatctttaaactctttccagtactgacaaatttcaactaagtttatttccattttattcatagaaaaattattgtttccaaattttcccttattggctgtattagtttcctaaggctactgtgtaaatatgttggctttaaataatgtaaatgtattctctcatagctttgaagtgcagaagttaaaaatcagtatcaccaggctgaaatcaagttgttgtcagggccatagtccctctggaggttctaggggagaatgtgttccatgacattttcagcttctggaagtggctggcattccttcgctagtatcctcgtcactccactctctccctcctgggtcacagtgtcttctcctcttctatatgtaaaatctccctctgtgattgcccccctgcagaatctggaaatggagtaagaatctctccatttccagatttgtactttaatyacatctgcaaagaccttcttttgtcacagaaggtatcattcacagattcttggcgtagggtgtggatatcttttgggaggccattttcagcctcacacaatggcaaagagattcttgcccacatactcttcacataagcttcattaatgttaaattggctcagcagaaatgacaagcagagctgtggatagaatttatacaaataggtcctgttttaaacaaaacaaaacaaaaacaaggataagtagtgaaagattagtttggttgaaatgaaatttatgagctttactttaaattgtattaagttattttaaagttttagcgattataaattctatctatgcattttaaaataatgtttacactagatatttgtgactattaaaaacacacatttggctgggcgtggtggctcagccctgtaatcccagcactttgggagaccgaggcatgtggatcacctgaggtcaggagttcgagagcagcctggccgacatggtgaaaccctgcctctactaaaaaaaatacagaaagtatctgggcgtggtggcaggtgcctgtaatcccagctactcaggaggctgaggcaggagaattgcttgaacctgggaggtggaggttgcagtgagtggaggtggcaccattgcattctagcctgggcgacaagagtaaaactccataacaacaacaacaacaacaacaataacaaaaacacacatttatttcttcgggattcaggtcattggtagaattgttagcttttcatctggaatatcacttatttttctacttaattacaaatttttgattacttttttcttttttatgttccttccaccctcttctacaaattacttaaaaattaattataggccgggtgcagtggctcatgcctgtaatcccagtacttttggaggctgaagtgggcagatcacctgaggtcagttgttcaagataagcctggccaacatggtgaaaccctttctctactaaaaataacaattagccagacctgtctgtgtgtctctgtgtgtgtgtttcagtcttattggaaatacacatatacatatatatgcacacagaatactgatattcagcattgtacactggtatggctatacttattattaaaataaaaatattttaatatttgataaataggtactgctcagggacttgtgagtacaactcctaccaccctcatgtttcttccagaacttccagaactcgggacaactcagctattaaaggattaacagctggcaaatactctgtggccatcatctcatctgattggtagaaacaaaaaatatacatgttgtkaaaatatgttgggtttatgtgtacatatatcaaaacattgttttacaccttgaatatatacaatttttgttaattataactcaataaagctgaaattttaaaagtgaaataaaaaagaagtggaagtagtatttttctataaattagaaatcacttgtttgataattcactttgacctgtagcctatcaaatagttatcttgatcaatatgttttttttcactctgctttaagcaaaaattttttaaagaaaagcttctcctcacaacattaggagatatttgtagtataattggggcaatttgaattatatgattcaataactgtgcgttttctgttagcctgctacactttccttcatgaagcctagagctacattcattaccatctttcaaaatatgctaacagttacttctaaccagctgaacacatccgattttttatataaaactgttggccacctaaggaacatattatctcagtaattttccagtacatggaaaatttgtgttttgcaagaagcactttaaaatatattccaagcatgaatgaacacacacacacacacacacttttttgtcttcaacatttactgttttttatattgtgtatttgagttttaaatgacatgttctaaataaaatttgactttaaaccattcactaagttaatttgacttttacacagttagaagtttcttttattaaattatttatgtaatctaataatgtcttttgatgataacctcctataagtcaaataaataatttggctcattaaaaaggattattatggtattatttggtattattatggtattattttcattatatttctttcaagtaatttgatatattttgttaagttgtatttcttaatgtgttaatatacttaaggtacgcaagatgtacaccttaagtagcacactctgcagatgtatgtgtgattagatgattcatatatttgtaatccttactaaaccgcttatatttttggaatctagaatctgtacaagtaaatgaagtgataatatcaaaacgtatagctaaaaaataaaaactactaacaatccccttacccataggtaaccatattgatatttttatatcttttaaaatactttaggctgtgagtttttgtgcatttacattagaaagatacaatatattctttcatataacttagaagactttttctgcaacctttaatatgcttaaatagtatattttttaacaactatacattattcagtcactctgtgtttgctaatagaagtagcaccaagactgatagacaaggctattgttttttgagcacatatcttgattgtttccatgaggcaagcttttataattagtattgctgattcattgaagttacttttttcttttagctttattttttttttgtagacagggtctttctctgttgtccaggctggagtgcagtgtcatgatcatagctcactgtacccttgaactctttggctcaagctgtcctcttgcctcaccctcctaattaacgaggactgtatgcatgcatcatcatgccgtttaatttagcttaattttattttatttttcattaatcttttgtagagaccaggtctccttatgttgcccaggctggtctcaaattcctgacctcaagtgatcctcccatctcagcctcccaaagtgctgagattgtaggtgtgagccactgtgcctgacctggaattaatttttctgaatttttgatgcagattgtcaaattgctattcagaaattttatactgctttatactcacactagcagtgtatcagacctcccatttgacagtatcaagtgaactcttttaaacattagctaccagacttattgttgaaagatcaatcaagccagttctttctttcagtttgctccayagcatgctgacattttgaggttgtgagttaaatgacataaagttttctctaaaaatttttccgactggaatttgaactcawtggagcataacacaaatgcaggatgtaccctccccctcaccaaaagagttttgtgagcaaagtttagtccgtaaaggctatagtctttactctttgcattgtctctcaaattaaatttatttagatttattatgatactcttatttggttatgaagattacaagaatttagaaacagaaagtgaaaagcaaggtgagacagctactatagacaaatgtactagtaagtaaaacctaagttactataacaaaaatacttgcaaaatccaggggcctaaagagtagagatatttattatgtaacaatcayaggtcagtgttccggatttggtagaaagctttgctctccttaacagttggttgcaattccatgaataagagagaaggagaaaatggagaaattaaaatactccactcaacaagcaaccctagtagaaatgactgttagagtagcagaagacagaacctttggaaacaaaatattgaagttattcagtgaatgagcaaatactcctttgtcaagtctgtgatttgattttaccctacctacaaacttagaagttaacctgttaccatattgtcgattctggcccaggactcctagaacagagaacaattattttattactcatggcacagtaggtatcatattttcattggctccccttgtcctccaagccccataggggtgacactatatgacccagatggctgctgctcacacgttgggttcacatcatagctggataatattgagcctggagaatcccttcttttgtagcagctctgtgtcttcaagggcatcattatgttatccttgaaggctgcttgctagaaggacagccctaagaaatggctcccattaacaatggtcagggccttgccttcttggcatacccagcaaaagatataggagcatcagagaaccatgcaggtattgttcctttcaacattcaacacccatcactcagtagcctctggagacatttgtgtgtacagcaagatgaatggattagtgttccaaaggatgtgggggttaaattcagcatgaagtagattcttcatgtcttaaaattgcaagtaytttctctgccaacagacacctttagaaattattattagtttatgatgggcctttggaggtattatagagccgtttacaaaacagagaaagcataggtggatagattagccaaagtggtagtcacggaaaactggtttatagtattttgtttcctcataccttgttctgggttgatgagtgagcaaaaggccctttcttaaacatattactgtagcatattatgctacaaattcatgtagcttaagggagttttttttttaagcttaaaatagttgaaatagattggtcttattgattcatgttttgtgataatggcttgaataatagcaacacctggcgatgattagctttaataggtgggaggcataatgaaggagaaataattgtattcatgtaacttagacattcctttcaccacttacttggcctctccgtcataaaccataatttattattttttggcatctgaaggaagtgctgtggaagcctgttcagagaagagaagtgagtattagaagctctgcgttgagcttttggctctgccgcttggttattttgggacttctggcaacttatgtaatctcacttaatatttaggtcacaaagattttctggaatcaagtgagataagaatgtaaaagtctttataaactataaggcattatacaaatatttaattactaagaattgtgagtacttaacctttctctattagaggagactgaagaatacgttctcctcaatgatgaggacataatatagcttttaatctggatttttaaaattgtattctacctccttttagaaagtttagtaaaaaaggcaactttgtgtaaaagctacaatttcagcctgctgcattggctcacgcctgtaatctcagcactctgggaggctgagacaggaggatcacttgagcccaggagctcaagactagcctgggcaacacagagaaaccccatttctacaaaaaaaccccagacccccccaaaattagctgagcatggtggtacatgcctgtagtcccagctcctcgaaaggctgaattgggaggatcacctgagcctgtgaggttgaggctgcagtgagctgcgatcgcaccactgtgctccacctgggtgacagagtgagtccctgtctcaaaaaaataaaataaataaaaagctatcatttcaatcatttggaagttccatttatatggctggataaattcaaaatcatttattcagttctaagtcttaatggtagattcagttaaaaaaataaatttgttattttttattatcaaaaatagtcatattgctggcaaatatgtgaacggatgattaaaggagataatgtttggttttatatggtaaagaatacaacaaataggaggtaaaagaagttgagaaggtgtggaaaatgtatgtgtctgtgcgtgcacattgtgttaatcaaacctgtttttcttctttagcttcctgaacatgttttcattagttgctatagaaagcaaatgaaagagatggttatataactcactaattgctttttttaatggagtaggatgattttctcccattgattgattaattgacagaagcttccaaataatattcttgtctttttagtatctactgttcgtttaagtaagcactcttatggctggtttgcagtggtggaaattgccagaaagccataaaatgttcaagctggaagttactttaaggatgatatagtaacagcagatgagaaaaccaacattgatagaattatgttcctgaaggtcacacatctgtatggtggtctagattcttaagatcagtcctcctttcctacttgtagcagtgctcctaaaccattatgtattatcagagttctggatgtattttaaagcaataacatgtcattctctttttaggtagttattactagtaaaagcggagagatcttgtatcgtatttcaccgtgggcaaagtatgtggttcgtgaaggtgataatgtgaattatgattggatacactgggatccagaacactcatatgaggtgagaacaacaaatctttaaataaattattgttccaatatttctaggaaagttaatttttacttttataacttttatagtaatgttcaatgcttatcttcactgacagttgcgtattttacatcatagtattccttttatactgtatgagtatcatagtctgtcttctgtagccagtaacatatagaagttagtttttgtgttgtctatgtttttgaggttaaagaaaacagaatactaaattgctatatactaatctataagggatactggttttttttttaaactacaatttctgattgatcagagactctttagtgcagtatttctcagggtttgaattaggatcaatgtccttagaaacacggaatggggaagaccatctcatgaatgtattaactagggtaatttttaccgccatattagtgacaagtgttctgtgattgtttgaactcactttctgtcytttaaatcattggagtttgttgatatatactttgcattagataattacatatgtatttcatggctcttacattttctctaaggcctaagttaaaaaaaaatttactcaatgataaggcataagctattacatgatttatcttttaaaataggtccactagcaggaccataaggactttttcctgagagaaaatttagtgagtgtagctggtgccttttatatgtgagaatagttccaagtgtttgagtatattcaccactttttaaaaatatacttgatcaggtagtgtcataccagaattcctggcttaactctatacataattttatattctgtagtttaagcattccrgaccaaagaarccacggagtctaagaatttatgaatctcatgtgggaatttcttcccatgaaggaaaagtagcttcttataaacattttacatgcaatgtacyaccaagaatcaaaggccttggtaagtaataactgtgatttttattcagataaaattttaatgagtctgttctcttattagaaaagctaattacaagtgtctcttttttgtgttaggagattaaatatgtaatagaaaggcattttattttaggcttctcaaattgccctgtaatagtgatagcatagaaaggagaaatggaataagatagagcataagaattaaagatattattccaatttaaattttaagtaatgtgaactgatgacttccaaaattatagataaatatgtaagcataattacttttttactggaggaaacctttatcaatttaagtgattattgactatagcctgttcattttagtctgttaaggaaaaaaatattttatctgtaatgtgaccggaactcattttgtatcagttattttatatagcccctgcctggatgatttatttaacaaacatttatagaatatctatgtgagacacattttgctagatgttcatgtattgaactgtaatggcacagatcctgtcttcataacaaacaggagagtaaagaatatattgctgaattattgattcagtgtgctttaaatctgttgtttttataggtaatgatatttaaaataatacaacagtatatttaacacctgcttcaatgactaggcaggaggataaagcacatgtarttatgctgcttctgctagagagtccaaattttggctagaagaaaggtttgtaaggcatggttaaagttttcagttatgtatggattatctgtgatggtaaagtcaggttccagaaaccaaaattaattaaatgtatagagtatttagtattaattataattaatagatattatgctaaattattatatttgagatattctttcatattatggagtaataaattgcttatgacccagttcttgcagaacgttcagcagcacaaggattctcttactcatctttgtgtttgaattgtctagcctagtacctggaatgaaagtgaatccaggaatgattaatgccataaaaattaagaataaaactataaatttgtgcttgatacaaggtatcagccaagaagaatgaaactaatatctttgtttataagtgtatttacaaatatagttgtatagttacatgaactgccattaamaatgagcttatataaaccttaagaaaattataaagcttatatgaattggactttgagagcagaataagaatatttactatgtatgttacagaactgtaacttccaaagtaatgaaatcatattcgaacattttaccaaattatacttcaagaagaaaaacctgtttttcttagcttttttaagaccaatactttttcttctgatcatttgcttatattaaaaatatattagaatttttttaatgttacggatttttaaaacacaatatctacttttttgagtcactttatttactgttagagcaaaacatattcagatggagaaaggaaggtgacgtgtgtttgtatatgcacatacatgcatatatgcaacttggaaataattttttaggtgcaaattatgtagtggaaagtagaagcattaatgctgactgtataaaagctaccttgcaggctgggcgcggtggctcacgcctgtaatcccagcactttgggaggctgaggtgggtggatcacctgaggtcaggagttcgagaccagcctggccagcatggtgaaaccccatctctaccaaaaatacaaaaaaatagccagggatggtggcacgcacctgtagttccagctacttgggaggctgaggcatgagaattgcttgaacctgggaggtggaggttgcagtgagctgagatcaagccactgcactgcagcctgggcaacagagcgagactccatctcaaaaaaaaaaaaaaaaaagctaccttatggaaaataagggtttggtgctatttcttatgctatatggaaaaaaggattgaaatatatagaaatacatagagtcaaaataaaaagcgtatgtcatgcaattggttatttttatttagctttcataatcttcaatatgaatattgcaagtgtaactgatgtttagcatatggagattgccgtttttaatatgctaaaaccaaattaagtaaatttgcatattatttattgcttgttaaaatgaagctatatcaaatagctagtcagaatacagctctaagagactatccaatgttgttagaaggtcaaacaaaaaaatgttaaagtagtagaacttttcaagacgaccaaagcttctagattgtttgtaaattttaatgtatttggaataaggatgctttttttccccattactttttttttaaatgtggcttttaatttagatttgaccattgccttatataggatacaactgcattcagttgatggcaatcatggagcatgcttactatgccagctttggttaccaaatcacaagcttcttwgcagcttccaggtaaaatcagagactcattgtgttcatttttattttgagccaataatttaaagaaacaaaatgaaattgttcattttttataacatcgtgtaaccttttaggkttaacagagttaatagaagctgaacattttcttttactaaggtcatagactctcttctcctccagccttagaaattgtcsttgattttatgttactcctcgtgggatgatttgtgatatagaatgtccagttacctgctgaaattgtcactcatttggagcccacgttttagtcagaaaatcttttcctatgaaagccattattgtgagagagcacatcgttttctggaaagagattgactcatctaggaaggtcaccgaagagtcccttggtacaacaattactactcacagaagggctgcccttccctccagactgaaatggatggaataattctctctggacagaaaagacaccaagggattctatgcaattaaagaggtgctgacctaaaagaccacagaccgaagaagtccaacactcagtgtcatggagtttatgatgtatggcatatagacattgctcccatcatcattcatacagattattatttttaactgtaataaaagctaaaatgaaaatgacagggaactataatcagaagtctgatcagtttagaatagatcagaacaaatactgcaagtgagatctaaaacacgactaagagttaactggggaaagcggtgaagtgggcgtaaataggtgacattccagacagaaaaaagatactggttcatttacctgtttctctttatattagttctccctcaataagttatctataatactgtctccaaatcctccactctggttctttcctgagcccactccaagtatgcggtctgcctctttactgaagttgcttttgtcaagggtattagtgaccttcacattgttgaggacaatgaacaattcttagcttacttaagctgtcagcaccccttggtacagctggttactgtcaccttcttgaaacctttttctttccctggcttccagaatattttaacctcctcttgttgcttttcccacctcacttgttgcttattattaatttcctttgctctttcctcatcatctttactaccactaaatattggacgtcccaataatcagaacttagttccattctcttcttcatctgtatgaaatattcgggaggatctcatcaagtctcatccagttttgtagcttaaatatatgctatatgttaactcccaaacttaagtctctctgacctatcttatgaacttcagaaagtatatatttgatgttggagtatctaatacatatatcaaacttcatgtgtccaaaattaaatttctgatcttaacttcaaacttcctccccctgccatcttctctaattcagtaaatgacattttcatcttctagttgttcaagccaaaaatcttggcattatactggacttgtccctttctgttcctccctacackctagctattaaaaaatctagccatctgtaacttcaaaatatatcccaaatctggctgcttcaactgcccccactgccaccacccatgtccaacttgcaattatcttttacctgggttatttcaatagctctttaactggtcactctgttttctcatgctgtctttccccttctcttacctttgttctaccaattaatggtcaatttttctgcacagtggccagagtaatcatttaaaaattaaagtcagatcatgtcgctcttttgcccagaaccgtaatgaatccctgtctccttcagaataaaagcaaaaggcctcacactggttcccaaggcctcacttgatgtgcttcttgcctgactcttagagctcacctcttttctttcttgaccattccagttagagtagcctgtttggttttcttcaaatgctcttagctcaaccctgccccagtcccctgcacctgctgttcctttctgtctgaatgctcttayccttagatattattatgccttgcttcttactttttttcttgctcaaatgttgccttttccrtgaaactttaactgatgaccctatttaaaatagcaaaccttccctccccaccagtggcttttctttgttttctttaggacacttattattatcgacattctatgtattttgcttgtttgttgtctcccaatgggaatgtaaattccatatgatcagtggtgtttatttttttcgctggtgtatctccagaacatagaaaatgtcatggtacgtggtagatgactttagtaagtggcaaacaaataaaggaatgaatgaaggaatgagtgaatggctgaatgaaaaaaaaaactttaaggctgtttattattgaacatgttcaatgagtataaaaatggataggtggctggaataaaaagagggtgtgggagagtgtcataagataattagcattattggaaagagccagtagatggtgcagtaggccacgatcaggacaatggtcttcaccctgggatgaatgggagcacaagtatgattttaagtaggtaacatgatcttatttccagtttaaaaagacagctcttgctgctcagtggagttggctattgggagacttgctgtatacttagcactgtaccatatcatgaggagcctgatagtaacagccgctgccctcaaggagcatatagtcgagtgaggaagagagacagtaaacaattgaaggcaaaggtgactatttaaagggcaaagttgatgctgtggatgactataatgtcaaaattttacacaggttaagaaaggcattcttctgtgagtaatttttgttacctatttcattcagactagggggtacctttgacacaaacacacctgcttgtgagctacccatcttatttacttgggtggtgacaaacgtggcacattgtcttggcccactggtaactgtgggcattctgtttttggaataagtgcaggagggataacctcaatcaaggtaccatggatattcaaataaattcttgaagagcccctcaatctcaaatgtacaccctgtaagtaatgggcagtgggcaaacagagcaggaatgacttgcttcaggtggaaatcagaagctctgaaaatagagaagcagagttttattatttacatcctcaaaatgtgaattttggttggggtataaatctacatttaataacccgatttaaattattttctaacttgatggttttaaatttgcttaatatttgatattaagcaaatttgagttgtatccaggtatcatgtcacatgctgtttggrtatttaaagtatctagtactgcgatggtgaaacaattgctgcacaatcggctgtttcctctaaatgtgatgtaatcttctttttgctgtgttcttcattgttagccgttatggaacacctgaagagctacaagaactggtagacacagctcattccatgggtatcatagtcctcttagatgtggtacacagccatgcttcaaaaaattcagcagatggattgaatatgtttgatgggacagattcctgttattttcattctggacctagagggactcatgatctttgggatagcagattgtttgcctactccaggtaggtacatacaatatagaaatgttttctattgttgctgtttaacattaatttttaagaatttcactaaattcatkgtgtgtgtactctctcactggtacttaatgttcttaattggatttatttttgttgtacaggggattttaccttgttttgtatagcacatgtatttgtggtatatttcattaaatttcaattttacatatcttacgccatgtaaaatatattggttatataatcatttaaaaattttactgtgaatcatttttttttaatatctaaaaggccactttatcaatttgacttaaaccatagccagtctccttttactagagraatacattgttttaagtaggccatttaaaaaaatcatacttcattgcttcatatcttaaaattacatggttttgattacagctaaattaatttataactataaaacaacagttactagtatataatatgtttcatgtatggtgccaagtgttttagatatattagctacctattttatcttatttaatctgcacagcaactctacttacatgtggtaaacactattgttatagccatcttacagataaataaactaaggcttagtgttgaaaccatttgttaagatcagacagatctctgacctcttctaccatttaaggagaagagtgttttacgtgattaaatagcatatggcaaaaattaaaaagacaagttaaaaaaccatgaacttgtgtttattatttattgtaagtgaaaaaatgaaaatgtcaagcatattaaaagcaaagtatcaagtaatgtataatacatatttttataatacatatacatatttgaaatatgtatatgtattatatacatattatatatattttatatatgtgtatgtatttttgaaaaaaattaatgaattttctttccagtgttgcatcatacataaacataaatatacctagaaaataggctgtatagaaaaatgtctcagcaaataattttataaaatgaagaggtctcatttttcaacctaaattagatgacttatatatgaaggaaattcatacattatttctggatatcatacattattttatatttcatagccattcaggaatcactcatgccagataagacagtgtaataggtgagaaaagaaacaagatggtagctgggttcctggcctagactcactctggtacaaactgattaatcattcttattctcaggctttttattatagaaggaggcagagtttggggactaatatagttttgctcatgaaggtattttgtattcatgtcaccttttgaacatttattattatgccacagatttatggcaaataaaaaagactaaatctgtgttaattctgtgatatattaggttggtgcaaaagtaattgtggtttttgcccttacttttattggcaaaaaactgcaattacataactctactaattacattgagtacatcttatagaagtagaatatgcccaagaaattcaattaattgaactctctggtttatatttggatgaaggagggttgactctattttgtagaactgtgccttatgaaagaaatatatttattaaatagttagatttttatgttttaaaacaattcttctgtagaattataccttaaaaagaaatacattaagtggatggatttttatgttatacaacatttttattttattcacatgtttattgtagtgtaccttgttgtaccaaagtgcatttaaacttagccaattttctraacaaaagggatcatacatcattgttttcaaaaacatttctatcacagaaattgagacaaacttaacattgttatttaatactcggcttcttttttattgaattaactattaatctttctcatgtgcatgcttttggtaaataaagcatcctatagttttagcttaatttattttttattgtgaccattttatttgttttttttctgctgtcatatagacttagtcctctgtaaatatagttttattaaattgcatttgtattattctacatgtcattctgtttgaccaatatctaaattttcccattttatagaattagtattttctatataggtttatactattaatgtattagggttctctagcaggagagaactaataggatatatatatatatttatatatgaagctatatgtatttatcaaggggagtttattacgagaactgactcataggatcacaaggtgaattcccacaataggtcatctgcaagttgaagagccagggagctagtctgagtccccaaacctcaaaagtagggaagcmgatagtgcagccttcagtctgtggtgaaaggcccaagagtccaaaagctgaagaacttggaatttgatattcgaggacaggaagcgtccagtacaggagaaagatggaggctggaagactaagctagtctagtttttccacattcctctgcctgcttttattctggctgtgctggcagctgatgagatggtgcccaccgagactgagggtaggtctgccttttccagtccactgactcaaatgttaatctcctttggcaacacccttacagacatatccaggaacaatactttgcatccttcaatccaatcaagttgacagtcagtataaaccatcacaattagtcatgacattattaaacaatatagataaaatcctccaaagccagtgtatataaattcatttaaacaaatacttcttagcaatcatgatcaaagtcctactttgctcttttggttatttattgctgcttagtaagccaaaaatttagtgacttaacagcaatatttattttgttcccaaactcacaatttgggtatacctcagtgtggactgctcttcttttcttcaccttgtgtcccctggggtggctcatataggggacagagcatctgctttcaggatggttcactcatgtgacctacggttggtgctggctgtcagctaggagctcagccttggttgtgagattgaggaccccaaatcccctcctcctagcccactccacagacaacttgggctttctcacaagagcgatagtcccaaaagacaggatatgcaagctgccattttatatggtctgggtttagaacatggcagagtgccatttctgttgaaaactactggtcaatcacagtttcaagaaaacttgaaaacttgttagtttatctaataaaacttgttaggtaaagataagagaatttttgcacatatccttaaaattccttaacgcccctcccttcgaaggggcgttaagtaattttaaccacacacaacgaatatgctactttacaaattcaaaatagatgtattgaaatacctgttcatgtggaaatattatttactcagccatatttctgttatgagaattatcagagagttatgtctgaaatagccattttttttwaaaaaaaatacacctttcattataaaataatgccattgtaattagaaaatttaaaaaggcacacaaaattcaaaataaaaaaactatatttgaaaaatgtgaacaacatacttgtatttagctatatgtgaatgcatttaatgaatattccttacatgcatagaaatacataacccaatccttcactttcaccctcttcataaaatagctactctgcctgtaattttgagtttgttccttattcagatgaaatcagaaattacaatttatgtttcatattttaaatacaaatttttccaccccttacatttgttaggctgattaattttataacccattgacaaacagacataaatatggcacatggcttgcttaagacctaagcctcttctttgaaaacttttgtcataatttttgaaattattatatttactgtttgaaaaaattgatgttatagaattgcttctgtagagatatgttgctgatgctcattttatcctatctatatgtcacaacctgtcaccatttagaatctgtgattcaagtgccatcatcaaagttaccagaattaaatctcttactctgagtaataccagagatcctgactgtgctatttcattacctgctatgaataaatttccaatcaggagctgcccatgtttaattttctgtctactcagctgaactgccttctagctttgctaaattagtaatgacagttcatcacagagattgggttgtcctttatttggtaaagagaactttctgacaagtgtgtcacccataagtttcaggagtttctagaattagtaataatgaatataatgtagtggtcccagttttaaattctgtttgcatattcctctggcactacataaatgcacttttaagacaatgaaaacttgttggatttaaataactgctatgccataaccattactaaatcttcaaatgaatatcttttgttcgttaaatatttctttcaaagataaaatactgacttctaaaggagatagcaaagtagatctaatgctcatgtttttcctccttaaacttatgtttggacacaaaattaatatagttatatttcatcagcttgagttcataatatgrtaaccattaggctaaaagatactctcttttcttgagcaactagagttgttttcagaaacaaaagtgagtccaattggtctttttagggtcataagtatgtagaataaagtactcttaggatagacactatatataatatttgggacttcttaaccatggtgggcattttctacaagttagtatgtggaaggaaattcaaggggttctccctgctcagagtggatttttgtatctgaggtaattattctatgatatcttaccatatggcttttctatggttaattagaattgatttttaatggtaagccagtcttgcattcctgaggtaagccctcatgaccatagatgtaagtattctaaacaaaattttagcttaattatatatgatattacatcatgaccaaatcagttctcaatgataaatattaacttgagggttattatgcatcagtatactagctaacgagtatatgacaccatcatgattagcaagattatttaaaaactaagcaaccatgacatgaatggaaaattctaaaattatttttaagaggatttttaagtcatacactactttttgattttgtcattgaattacaaagagaacaattcacccaatgacaaaaacaaaaaaaatacagaaaaaatagcatacaaaggataaatatgtacaaccacatttgaaaacaatttggtattatttggtaaagttagagatacacatatactatgctgcatttttcaatatatatgcttggagcatatgtttgtcagaaattttggagagatagacttaaaaaaatcactcctttcagagaacagtaggcgcccccatttatctgtggttttgctttctgtgatttcagttactcatagtactttagcttgaaaatattaaatggaaaattccagaaataagcatttcataagttttttattagttttcaatagtagcctaatgctatgtcacaatgaggtcattcacctcacttcatcatataggtaccttatcttcatagcatcacaagaagaagagtgagtacagtattacattttgagagaaagaaagattacattcacataaattttattacagtatattattataattgttctattttattagttattgttaatctcttattttgcctaatttatacatgaaactttatcataggtatgtatgtataaagacacagtatatatagggtttggtattatccatggtttcaggcatccactggcagtcttggactgtatctcctaaaaataagggagagctaatgtatttgtttttaatttcactggatagatttcaaagcactgaatttttttataattgaagtaatatagcatcattttagacatataaacacctgccttatatgctttacaaaaacaaatgatggctggacatggcggctcacacctgtaatcccggcattttgggaggccaaggggggctgatcacctgagattgggagttcaaaaccagcctgaccaatatagagaaaccctgtctctactaaaaatacaaaattagctgggtgtggtggtgcatgcctgtaatcccacctacttgggaggctgaggcaggagaattgcttgaacctgggaggcggaggttgcagtgagccgagattgcgccattgcactccagcctggacaacaagagcaaaattccatttcaaaaaaaaaaaaagccaaaaaacaaatgatggatgattaaaagacattttggacatagtttagcaaacagctaactattccaaaggaagtcagacagtaagaaataagcagtaacttatagcctgttcttcactaagaatattataatctcacagtatgttaataacttttgagagtactgagtgtcccattaaaagtcttcctgttttcttaatattttttctttccctttcagcatttcttccttgttaaaaccagaatcttatttcagcttgattaaggagaacagttaaatctactactctttcaaataaagtagagttagcttcaaaattcagacagactaattctcttctgtaaaagagattaagaaagttgctatatcaatccaatctgtctggatttgagtttgaatggtagaaatataacttctctcacagggtttatgagattactcagtctagcagaaaagtttctgttgatgcagagtgtagcacaggagtaaggatttaccgtctttgtataaactttgttcctggtattatctgcctcgtttattccccacaagcctaaaatttaggagcacagggatattttgaaagtatcttgagtatttacgtcttactcacctataacattcaccttctcaaatccaaactcatgctgaagtaggacagttctgctgggtaatttaccttaagtttaaaaatgctgctcattgccctaaaacatctctctattttctttctttcgcttaaaacaatggttggtgcatgcttgtgaaaatggtcctaaggtccctattcaagtgattatccatttaagtctgggaattatgtggtatctataataataatggttttgtttatgacctttttaaataagcaggttaaaagtgggaaaaaatcaatttttctgtttttatctgggtgtagcaaaacagcttgtttaaacatgtctattttctacagaatagactagcagttttgaagttatgaagagatatttcatggttttctagctgaatgatttccttagtgttatgctgcagataaataactcatgttacattgagtcacttactttcagaaaatataggtttttcttataatttcgaaagcatccatatataagtaatataaaattattcatttttgaggaccttattcccattaacttagattagtgagcaggcagatttttatctaacttctgcatttcccatccacattttataatgttgaggcatcactattgagttgtaacttggatcttcggtcttccttctgtttctttcaccatatgtaagagaagccgatagccacaggatttggttccttgtctacttctaggtttaactgtctccccaagattagacttttacctgtatagcctttcaaattctgtctgttgaaagcatcattaaaacttgggggcagttacagttacattttctcatagcacgttaggaaacaaaacagcatgatagccaagttgtctgagactggagctctgttcttaacactgtgttaagaacagtgaaggaggccgatgagctgtccaggtgggttccccttgcctttgtgagattatgatattcatgatggttactgtcataccttcattcatgcagttttgaagcattaggtgctttagaagcttctcaggccacttgatataaaataattcatctagtccctaccatgcttccctgccacatgttccttcactaacttttctccattgtctttcccaccatgtgacatttggaatagttgtttatttttaaattttagtggtatatttgttgtttccatattaaatgtgaaaggaaagttaataatttgttgtttctcatgggatatattttatgtaaagtaaaatacctctcttttttccccctgtctcttgatctctccttctctctctttttctctctctctcaagtctctgtcataaacttttcaccatcatgcttgccatggcggcaacactgcaaagtgatgtgatagattcctgttcgttagtactgaaaacagtgaagaaagccacacaagatgtttccccccaaaatgctaattacaacactaataatagcaataatcatgtatactatatagaattaagattaattgatttaatacacaatataaagtgggtggttttagaattggatgatctttacctctctgctcttgaaccaagctgcttacatttgagtttcagtttcatgtataaagaactcataatgatattatttatgtgccatagggcggtggttcagactgcataaaataatacgattgaaaatgtgcaacaactagaatatagaatatcatggaaagtttggagttatactttcagatttttactaaaggataaaagcaggactcgcgaacgaggcaggtaactgagagaagcaggccaggtggttcttaytggcaacctggcaaacggatctcctctgaggtggctgccattcacaaaccatttcgaatacaattgtcagttgctttcgtgttgagaatgtggacccatggagccacatcttctagttatttaagtcaggagcccacattttatatgaaacctccctatgttaaaatgtcatacaattagtttaaaatgttcattcactgtgcataccaaagcaacatacatgcaggatggataaaaaccagtcactaaggctatctctgggttccaaaatgtgccttaggagacacgcaacaaatcagattctaccaaactaccaaataaattaaggcataagtcaaatctaataaggacaactataccttcatagattaaatatagtatttaatactctattttgtattagcaatggtaattttataaacctcaactattagtatattatcacctagcagaattgtgtaatatctccttgattttaagtagtagaggaataaacaaaataaatgtcttttaatatcaggttcagtaaagcagaatacaactttattaaagaaatctgtatagttaaaatttggtaaccttgtttcttttaatgctttgcatctaagttgctgttaatttgtttttaaaatataaatatagatactgaccttgcaggcagtatagagaataggtataggcctgggctcaaatactagttcatcacttactagcatgtaaccacagccaggttaatctttctaagtttaactttaatttccccctctgtaaaatactaataagattatagtttatctaccttgtataattgtgaagggctcattacacacttcccccagtgtctcaattatagttgtgataattgtcattgtcactgtcatcacaatatcattgtcatgattatctgtggtcagacttactagccaccctcgttctctgaaacataactacaagcattgaaacaggtaataatatttttttcatgagccaaaccatgtgccataatgtttatggatatttgttcgttgttgtatcacactatttttaaaaggatgtcaagctattttttggtagaaggacaaaattcagaacaattgtggaactgaccaactgtgatcaatatctaacagtattgagaagtcacagcaaaaaacaatggaagaaagagaaagtgcctcaaggtcagaaaccaaaactgaatgcccagcattgtaaggccatttacgtgcagcagcaaacagctccgcacagtgtaattgtccctctgggcattgttagactgcagtatagtataataattgatgataatgagtctgagtcattaaaaaataaacttcaagtcatgttcaaaatttctttttaagatgccaggaaaaagtaaaatatataatcctttgggtatatacctagtaatgggattgctgggtcaaatgatatttctagttctagatccttgaggaatctccacactgtccacaatggttgaactaatttacacccccaccaacagtgtaaaagcgttcctatttctccacatcctcccagcatctgttgtttcctggctttttaatgattacctttctgactggcatgagatggtatctcattgtggttttgatttgcatttctctaatgaccagtgatgatgagcttttttttcatctttgttggccacataaatgtcttcttttgaaaagtgtctgttcatatcctttgcccactttttgatggggttgtttgtttttttctcgtaaatttgtttaagttctttgtagactctggatattagctctttgtcagatagatagatcattctactataaagacacatgcccacatatgtttattgcagcactattcacaatagcaaagacttggaaccaacccaaatgcccatcaatattagactggataaagaaaatgtggcacatgtacaccatggaatactatgcagccataaaaaaagaatgagttcatgtcctttgcaggggcatggatgaagctggaaaccgtcattctcagcaaactaacacaggaacagaaaaccaaacactgcatgttctcactgataaatcggagtcaaacaatgagaacatatgaggatagagaggggaacatcacacaccagggcctattggggggtgggagacaaggggagggatagcatttggagaaatacctaatgtagatgacaggttggagaaatacctaatgtagatgaccatggcacatgtatatctgtgtaacaaacctgcacattctgcacatgtatcccagaacttaaagtataataaaaaaagtaaaatataatttcaaagtgtttccattaaaaattttttattttttatgttttttttttttttgagacagagtcttgctctgttgccaggctgtagtgcagtggtgcaatctcggcttacgacaatttctgcctcccaggttcaagtgattctcctgcctcagccttctgagtacctgggactacaggtgcacaccaccacacctggctaattttttgtttttttttttgtattttagtagagacggggtttcaccatgttggccaggatgttttcgatctcctgaccttgtgatctgcccaccttggccttccaaagtgctgggattacaggtgtgagccaccacgcctggtcattgttaaatttttaaatgttgttttagagattaagttaaagttaccggtctactgtgttttaatgagggattactgtgtagattttatgtggactactttgtttccctccaatgtcgaataaatgaagcattcctccacttatgttttaagtgtccaggtgccaaaggctattactaatcagttattgaattgactaccttgcttattttgcattttatatcagggaatatctttctttttttctttttaaagagagagtctccctctgttgcccaggctggagtgcagtggcacagtcatggctcgtgacagccttgacctcccatacccaagcaatcctcccacctaagcctactgagtagctaggaccaatggcaaatgccaccatgcctggctaattatttttattttttgtagagatggggccttcctatgttgcccaggctggtctccacctccagagctcaagtgatcctcccacttcagcctctgaaagtgctaggattataggcatgagccaccatgcacagcctagggaacatcttatatatttcttaggatcctattttatgatgctcttttctgagaggaaaacaggattttaagctattttctataacattggctagtttaactctactgattacatgtttaaagtattatttcaacatgtaatcaatggtaaaccaatgtaaaaatcagttgagaaacaaggtatttgacgtattttagaggtattacgttttggaaatttggtgtgtattttacacttagggcacatctcaatttggatgttaatttttcatcagaaatagttgatgtgtatttaatattcataattttacagcaaaaagttgattcacctacctgagttgtttcaaacatacttaaattttgtagtaatggaactgrgtgccagtttttaaatctacatcaatataaaatagtttgaagtcaggtagcgtgatgcctccagctttgttcttttggcttaggattgacttggcaatgcgggctctttttcgtttccatatgaactttaaaatagttttttccagttctgtgaagaaagacattggtagcttgatggggaagtcattggtagcttgatggggatggccattttcacgatattgattcttcctacccatgagcatggaatgttcttccatttgtttgtatcctcttttatttcattgagtagtggtttgtagttctcctcgaagaggtccttcacatccttttgtaagttggattcctaggtattttattctctttgaagcatgtggcactattcacaatagcaaagacttggaaccaacccagatgtccaacaatgatagactggattaagaaaatgtggcacatatacatcatggaataccatgcagccataaaaaatgatgagttcatgtccttggtagggacatggatgaagctggaaaccatcattctcagtaaactgtcgcaaggacaaaaaaccaaacactgcatgttctcactcatacgtgggaattgaacaatgagaacacatggacacaggaaggggaagatcacacaccggggactgttgtggggtggggggaggcgggagggatagcattaggaattatacctaatgctaaatgacaagttaatgggtgcagcacaccaacatggcccatgtatacatatgtaacaaacctgcatgttgtgcacatgtaccctaaaacttaaagtataataataataataaaaaatatataaaaaatacaattaaacatccagttttgtggcctccctagccaggtttccagggctcagtagccccatgtgaactgcattgaatgacacaggtatagcaagtagtctgaaggctcttgctgttaacagctttgtaatcattacattgggtaaatctacatccatttattgagttaggtggttataatattttatttttcaataaacccttttagtagcaataaactaaaaaagtatatgttttatgaaaagtactaaatgtctcttaagaaattaaacatgtaatagactggattaagaaaatgtggcacatatacaccatggaatactatgcagccataaaaaatgatgagttcatgtcctttgtagggacatggatgaaattggaaaccatcattctcaggaaactatcgcaagaacaaaaaaccaaacaccgcatattctcactcataggtgggaattgaacaatgagatcacatggacacaggaaggggaatatcacactctggggactgtggtggggtcgggggaggggggagggatagcattgggagatacacctaatgctagatgacacgttagtgggtgcagcgcaccagcatggcacatgtatacatatgtaactaacctgcacaatgtgcacatgtaccctaaaacttagagtataataaaaaaaaaaaaaaaaaaaaaaacttaaacataatagtcactaattattaatcagttgccaagaattgttttatacaactaccagtaaaatcaccaatttgtcagccagtaaacacatgtaagtaattattttggcttgtttttacctctcaaatatgactcaggcataagtgaattagaatgaatgatttagttgtataaaatttagttatcctgggattaagatgaaataaataatttagtaacatactctgttgctatatatatatatatatatatatatatatatatatatatatawgcaattgttctttctcctttatattttaaagggtaggctatttgcttaaatgatgggtagaatatataaatatatggtgaaacagactgttcaattgagttttgtcatgaattttcaaagaagtttcattaattaaattttgtaaatatgacatgatcatttacatagagaaaacaatgttagcagtaatgaagaaactcatcactggctctttggcattttgcctaactctgatcagaatttttgatttctatcatttgccattcttccacaatgatcacatgaataaatcagttttcagatttcccagagctcttgccctcactgttagagtccacaagattccatctagggtcttcttcatgttcttatctgtatgcttttcctgaggtctccttcatggccatgatattcattctttcaagaattcagtacctttttgttgtagagactatgctgcacctggtcaccttgaagaagagaaagacatggcccctatttcaggaaattaaaagtctaaagaggatgatacacaatatgtatgctaatgcaacccagggtgacgtattgatagttgaagacacatataagggggccgcctgagtctgaaaggggttggaattgtcatgaaagcctctggaacaaatggcccctccctgtctctaatttggagtgggcaagtctcataaactctgtgtctcatattcttctttaaaatactaatttaaagggtgcctatctcatggagctattataagatttaaaatattaaaaatatgtggccaagcaatgtggctcactcctgtaatcctagcctgtagtccagtgctttggaggcttaggtgggaggatcgcttgaggccaagagtttgaagttacagtgaggtatgattgcaccactgcccactgcattccagcctgggtgacaaagtgaaaataacaagaacaacaacaacaacaaatatatatgttttatatatatatatatatawgtaaaatatataattttcttataacagttcttggcatattataagaattagtattgtttcttataactgccatggtttattctaaaattagacttctcagttgagctcgaattgatgtatcacataaacaacacacatacatttaactgttacaggtccttccctctttattttacttccacatgatttttcaaatccagattctctttcttactccccaccctgtgttaaaaatgctgttattattcacctccattctttgttctcttccatgtgagtatgtgttttattataccagttattggattgcattattatcatagtttgcttttctcctttatacgaagccaataataaaagtttcagcagggcaaagaccatgtttatcttgtttcccactttattcctcaggactggaatggtgcttgacacatttaaacacagatttgttgaatgaataaataaatgaatacatttatgctaattctcccaaattagaatatagatcttataatcctcttccttaagcaagtacctcagaacctgctagagaatagactgtcaaagtttgtccagatgagtagaaatgaagcccattatctctatgaagtaatactttttgaatagtttagatccttttatacccagatatagaaaatggtgtttcacttcattcacgaaataacaatggcatccaggtttattatagctcttcgttccatataatttctttgggaaagtgggaaataatccaccaaggaggaaagttcagcaggaaattaggaagtgtgatacatgaaaggtgttcagtgatcaaatgcacttggaaaaccccaaattaaatcaaattcagcacatttctttagaatcaamattcttggaatctaattagctaatatacattttgaatctccaagtaagtgctatataataatacttcatttttcaaatgtattagaccttgaaacacttcaaatgcacatagaagagatttttttttttttttttttaatgagtctgaacatggcttatggggttttgaaggatctggctctagtctcatcttgacatcctttttctcttgcttactacgctctagccactccagtgcttttcatgcactggggctgttgtgcatgcttttatctttgcctggagtagttccctggtatccatctcctgtttattttctggtcctcagtgtaaaagccccttctccttatcttcgctggtctaaaatcagttcstcaggaacgcttgctcaaggcttcctctttttatcctttacttacttataatctgtagttaaaagttgcaattgtatttgtgttttatattctgaaatacaacttacctatttttcttttgattttacctttaggagctatttcattgcataagtgtacatatgtaaattctgtgctataaacattgttaatggtcgttttacttttgttttgtaaagaatatcctgtttgaaccttatgtccttgaaagaaaatgaagatttttactactaccttaaccaatacagatatagtgataatagcttgagctagtgagtggatgaaattagaatagatgtgctttggcattcaggctctgctgtttccgagcrtgagctgctccttactgagcagtgccggcattgttttgttgtttactttattgaaatcttaccgcccctaaactagcatcaacatgtagtactatttatttacaacatacaagttaaggaaatgaagtctctttatggttatttcctctagcagaagataatagcacaacctgcttcagtatttacgctttttaaaataaaacacaatttcaccttttcctcatcagcccatcagaagtttctctggctgcctttcttcctctccttctctttctttctcattacctttccttttctccccgtactccaatagatatcagctgtacatttggtgattaagctttgtgatatttraaagaagatagccaaaaaccagaaataaaagtcaagggctaggcatggtgactgtcctgtaatctcagcactttgggaggctgaggtggcagaatcacttaagcactggagtttaagaccaccctaggtaacatagcgaaaccctttctctacaacaaaattaaaatgaaattacctgggcatagtggtgcatgcctgcagtctttgatacttgggaggtgaggtgggaggattgcttgagcccaagagtccgaggctgcagtgagctatgatcatgctgctgcactccagcctgggcaacagagtgagacacagtctaaaaaaaaaacagtccaggattttattttttattggtacttatcagttttaggaaagatgtaagggaatagttgtctctatgttctttctaaaagtcttaatttacagactccaggtgcctccagtgactgaagtgtaaaatattaaaagatcatagccaatgcaaaaataggaatgtcagaatcaaatatcctgagaagaagctatcagtagtgtctagagtcttagatagtattctcttaactgataaagacctgaaaatatcttctatcaaggcaggagtgaagcattctattcttggtttctgtgtttttcttccccacaccacacatccctccttctccctccccctccccctccccctccctcataacataaaagcaggcaggattctgaggcagggaaggatttgagtctatgtcaggaaaagtgtagccgtggttttattttaggaccctactcttttgtcttccctgtggttggctcttttccctgctatgctgattattttagcaggtagaaaaaagtggctgctgctagaaagtttccttaagaaatgtgaatattttaggctatttgagcataaacgtagctaattcagacacactgggaacaaaccagaaggagacttggttcttttccattctttctgcagggtacattaacatcccatagaaagtagagatatgcttcttgtattgtgtgtgtttttaagttatgttaccttatagatatgaactggctcaaataaatatctactaggttattttcttatttatttacatgttatgtgtgtgtgtatgcatgtgtgtgtatcacatctaaagtccaaaagtttataccggttgatcatatattatttaatattttggttttcagaaattcataatctcaacacacctaaaatttatagacaatagggcaagaatacacatttctagactgtgcaagtgggaagtttactttaaaaatagatatgaaatactgtttctgtattaaatatatgaatattacatgttaggagcaggaggctttatgaacaaatgttgatgcctaagtaatatgcttgtgagaatcctggtatggttaggctttgtgtcctcacccagatctcatcttgaatgtaatctccataatccccataatctccacgtgtcaaaggagagatcaggtggaggtaattgaatcatgggggcatttcccccatgttttctcatgatagtgagtgagttctcacaagatctgatggttttataaggggcttgtcctccttcgctcgggacttctctttcctgccrccttgtgaagaaggtgccttgcttcctctttgccttctgccatgattgtaagtttcctgaggcctccccagctatgtggaactgtgagtcagttaagcctttttcctttataaattacctagccttgggcagttctttatagcagtatgaaaatggactaatacagatcctatattaaaaataagtctgggtcaggcacagtggctcatgcttgtaattttcgtactttgggaggccaagacaggaagaatgcttgaggtcaggagttcaagagcagcctgggcaacatagtgagacccccayctttatttaaaaaatgaaaataaaaatagccaggcatgatggctctcacctgaagtcccagctactcaggaggctgaggcaggaagactgcctgagcccaggcaacctggaggctgcagtgaggccaggaggtttcagtgagccatggtcatgccactgtactccagccttggtgacagagtgaaacgctgtctcagataataataataatgtctggcacaccatatatgctaaattaactaatttaacaaaagtttgagtacctactggatacccaaccttcctgaaccctgggaatgaagcagtgaagaaaacagataagacaccaaccctcacagccctatactttggtgaggaagaccaacaatacaaagtacatttctaggtagcaacaagtactatgaagaaaaaggcaaccagctagaaagattcagtgttatgttgtaaagtggctgtctattagtgtgtggtcaagataagcgttctgaaaaggtgatatttaagcagagacctgaatgaagtgacgtgcaatatcatattctgagaataagcaaacagtgaggagaaaagcaattgtgaagtccctgcaggggcagtggggttggtgtgtttaaaggaaggccagggagatgtagattggtaagtgagggagaatttcaggagactccagagagtttggcagttgtcagatcatataaaaccttgtaggcccttgtaaggagattcagttttcttctgttttattcagtttattctgtgtttgatggggagctgttttaacagcttttaaaaggtttggatcagggaaatggtatgacattactgaaaagatcattttttctgttctagaaggaagagagatgttgagcagatgtagaactggtgggcagatttaagatatttgtattgcaatagtccagtgagaagctgtcttagatcagtgcagtagcatcaggggctttaataattaattaaattaaatatggagtgcatgttgaaggtataactgatttaaaaaaagaacttgctgagtgattggttgtatatgaggggaagaaagaagttaactccgacgtttttgaccaagaggtaaaaaggcctctgaaaatgggacttctgtcataaggtacactgtagccattcacaaatccatggggaactgggaggagaaggacttgggggaaaatcaagaggttagttttggatatcacaagtgcgagatgcatgtttgctatgtaagtggaaatattgagtaggcacttaaaaatgtaagcctggaatttagtggggaggttcggactggcaatttgagtcagaaatcatctgtttgtaaagggcattcaaagcagtgagcttgtatcagatcatctgaagagtgtgtgtgaagaaagatgtggttgagctactgagctccaagttactctaacataaagaggtcaggaagaaaaacagaagctggaagctaagaagataaagaaggatatgcaggtgaaatgggaggacctatttaaataagcatgttttagaaggagttagtgctcaaaatgccagctgcatttgcagagtttaatttagatgaggattgagaattggccattgatttagcatggtggycatttatttggactaaaaatggttttgttggaatgattggtctgaaattctgattcatatgggttaagaagaaaatggaaagtgagaaagtgaaggcagcaagtgtagaaaacttttatgtatagagagaggatatttacaaagtagtagaaaagtgggtttggtagctggaatggaggtcaaaagtcaaaaagtttcttttaaggtaggtgatagttcagctgatgggatttagctgatagggttcttagaaaaatgcaggggcaatttatctgatgtaataaaaaagtaggtgaagtatattggttttttgcagggaaagaggtagatttgattgggtgttgatgctttttaattgcttccattttctcatttaaataaaaggcaagaccatccagtgaaagtgaatgagggagaggtattggaaattccaggtgagaggaaatatggtattgtccactgcaagagtgggagagtagttcactaaggaaatgtgataggattccttagggatcaaattcaactaaggtggagttttgttaggactaggagagtgatgtaaaggaatgattcgggtaatagaccgtgagaattctaatttggataagtgtggacaggacagccgaagaaggatagtaggtacaaaagatgtggttaggagtaattttctgttggggggtgaagaattgttggatgagggtactgaatattttggcttgtggaacagccttataaggagaccaaagcatgctgtgacttcccttaagtcacaacgagggctctttgaaagccaggaggagggcagtctcttaggatcccctcaaaaatgtttgaatgacaatggtgtttctccatttcccttacattttcatatacttaacttttccaaaatgatagcaacaataaaaagattcacaattttctaggtcgaatctattaaattatagcattaaataataagccacagcaggaggtataattataaggtawccttgagagacagttgattcgaatacactcaatccatcaccaaatgtattctccaaagtgcagagtaagctttctaaaatgcaaatttgacatgtgactcacaaatggaaaacattcagtggtgtcttttctgttgcttataacagagtaactgaaactgggtaatttataaagacaaggaatttatttcttacagtgatagagactgagaactccaaggtcaggggcccgcctccgtgaggtccttcttgctgagagcgtctccctgcagagttcctaggtattgctgtcctctcgtatactgagtctctgtgactttacacatgacatttcctttcatttggaatgcacttcctcctctgctttatggactatcttatattttaagaccacatatctttcttaccttataagaaactttcatagaagatctcctgtcctcatcctcattcctgcctggttgacattcttcccgccacctcactgcaactcaatcaggacgttccttttttatttaaatactgtttaagtataatctacttaaacaaatctaatattgtataaattacacttcccaaaataaaaaccctccccattttactctttttaccggaccacgtcatttcagcgacttgccttttgactttatttccatagcatatgcttgtgctcaaataaatgctcgttaactattagaatactttctaaaataaaagtatatatactaagtgctctttaaatttcatatattaaaacaagatggtctgccattaattttggcttttgttattaaaaattatttccatgtcttgggaggccgaggcgggcggattacgaggtcaggagttcaagactagtctggccaacagagtgaaaccccatctctactaaaaatacaaaaaaatggccgggcgtggtggcaggcccctgtaatcccagctactcaggaggttgaggcaggagaatcacttgaacccgggaggtggagggtgcagtgggcagagatcgtgccactgcactctagcctagatgacagtgcgagactccatctcaaaaaaaaaaaaaaattatttccatgtcaaaaataatttgaccttctcatgctgtcatatatgacagccttttaaattgctgttttatgtcattgatttaatttagtttcctgaggaatttatgaaagcaatatttttaaataaaaattatgatttatttttaaataaattaatttgcaaagtatatttttttaaatatggagatattttagctcataaatgtatatgttttttaatgrtgatgacattttaatgctacgttttttaacttgctatgaaaaggttttactctaagagatctacaaaaaaaggtaaaaagaaaaacttcattttaaatgtaaaatggtattttgtttcctcacattaaaatgcattttaaaatgtcaaaataaatgtgaaaagccaaaattaaatctcttggtcatatttttgaaaagtgataattctattttaattaagtccctaaagaatttttaaatgtgagtgtctccaacctagaggataattttaaaacaattatgtatataattatttgctttataattttcttccatcccacatagtcataattttgagcctttattttaatgagcccccatgaaatgatgtgttaagtgttaataatttccaacctcccattttattttctcttgattaatggaatcaataaacaatttatattaaaatgcaaatgtggacatatacactcaaatgaaataaataatctaattgtcagttttaaaaaattagcatgataatctatagttgtacccttaatatatgtgaaatatgtttctttttattctaatttcaacatggatagatatagcagaagaccataaaaccattttgttccatctaagtgagaaaatggtagattatcttaacatatatgtatgtgtagatatatttacaagataaatttggatcaagttcataaagacttggataatatgaaggacaattttttttatagaatgaatactacatgcatagtttagccatggtgctgagggtctgcagaatatcgttgttattcttctttttatagggcagagacaaatgctaaatatatcaatattattgatgattttaccagagataccgttttaaaaataagtgaatgaaaattacatgttccttgcaatagatgacaaaattatagtaattttctgcatgtttgcattattttgatataatttaaagagtcattttttttaaaaagaatctcatatataagttcaaagatttccaaaagtatattaggtacagtgtttcttttctgggtgtgtagcagttttycaggctgagaaaatgactgatgagtagatttatgaagagcaaatatcactaaaggaacatcaataactttagctgtagtcttaatttttcaagtaagtatgcaagtaactaagtaatgcttctttttcaaggatttactctacatgtgtaaaatgagagttggcctaaattcatttctaacctcttaatacaaagggagattcaggataggatatgcatcctcaatgaaatttctgaaccgtgagagaaaagtgaagcaaaatgccaaggtgaaacggcatgtgaggaaacagttcctgatttagaatgtcaaaggcgaaagaaacttctcactgctattcaaagtttattcctctttgtcctgcctaaaaattaacacgaaaatgatccttttcagtgggatcatgtagaatcatggagtgtggagttgagttttctgaggtcaactagggatcacttctctacagttttttcatggtgtctaattttctgcaagctttctggaaaacaatttgtgagtacttacgttaataagtcctagagaatgatcattgaattattaaatataaggtaatctattctaaggctgtaggccaactataagttaaaaatgctttgtgcattaagatatttcttacaagtttattaattagaaaacagtgaagatattcttctagaatgatgatcaaattaagacattctcagatgaacgaaaactaagataatttgttgccagcagacttatcctagaatggttaatggacattctatgaaatggagaagaaaaaatggaaagagtaaaagtacgrctaaatacaataaagtttccttctctttaatttttaacttatgtcactgtgcagacatcaaaataacagtaaaaggatactaggaataactctacatacatacatttggtaatttagatgaaatggatctatttctaaaaaaackctaccacaacttaccaaatctgaaatactataattaccctgtaactattaataaaatttaatttgtaacttaaaagcatgtaacataggaaaacctacatgtacatgtgttttcaatgggcaattttctgaaacatttgaagaagaattcacactaatctagtatagattcttccagaaaagagaaaaagaaggaacactacccaattcattttatgaagccagtattgccctaatattagaaccagataaagatagtaataagaagataactacgggtcaatattcctygtgaattaggagcaaaattcttaacaagatattagcaaatacaattcagcaatatataaaaagaattatacaccataaccaagtagggtttattctagaaatattaagcttgttttgtatttaaaatcccaacacaacacagtaacaagctaaagaagaaaaaaattatattagttgatgaagaaaaagtattttgccaaattaaacacccatttgaaataaaatggctcagagtaataggaacagaggggaactgtcaagtcttaataaagaagatctgttaaaaactgaaatgtgacaatatacttagtgtctaacgtctaaattctttctttctaactttgggaacaagacaaagaagtccactatcaccattcttatttaacacagtgctgggaattctggctaatgaaataaagccaaaaataaataaaaagaaaagaaaataagacatagagatcagaatggataaataaaactttcctttctctttgtggttgacatgattgtatatatagaatatagaaaataccaaggaatctaaacaaaacccctccagaatttaataaatgagatgagcaaggttgcagttgtatttctatatactagtaatgaacaggtggttattaaaattaaaaaatatactatttataaacacttattctctccctccttctctctttcccttcctacatccctyccttgaagttgtttctctcttaaaagaagtagtaagatgtaaatccaataaaatatatacaggaatgtataatgaaaactataaaacactgatgaaaaaagaaaatttaaataaatggagatgcatactgtgttcacagattggacaactcaaagtagtaaagatgtcatttttctccaaatcaaaagctgtttaagacaattcctatcaaattcttggaagacatttttacagatgtagacatagagattatttcaaaattatatggtaagacaaacattagaacacttaaaacaatcttgtaaaagtggaataaagtgggagcaatcagtctccccaatttttactcttatatagttatagtaatcaagactgtgtggtatcagtggagggatagacatattgatggaacagaatagacaacccagaaatagacctacgcaaatatgcacgactaatttttgacaaaagcacaaaagcattgcagtggaggaatgatagacttttcaacaaatgatacgagagctgttggacatccatagaaataaacttcaacctaaattttctaccttatgcaaaagtttactaaaatagattatagattaacacgtaaaatgtgaaaatgttagaaaaataaaactggagaaaatcttcagctgtaggattagtcaaagagttcttagacttgacatgagaatactgtcaatacaaggaaaaattgataaattggactacttcaagattgtgatataaagttcttgttaagatgatgaaatgacaagctagaaactcagagaaaatgtttgcaaagcatatacccaaagaggtctcaaatccacaatacataaatgtgtcaaaacgctacaattaaaataatcataaaatggcaagaaaacagaatatatagatggccaataagcagatgaaaatatattcaacatcattagggaaatggatactaaaactacaatgagatatcactacatatctatcagactgctaaaattaaaatagtaactacaccaaatgctggtgaggattcaagaagactggatcattcctggtgtgcatgtaaaatactataatcactgcaaaacaatgtagtagtttcttgtaaaactaaatatgcagttgtcatacatgccagcaagcagttgcactcctgcatatgtattccagataaattaaaactgttttcacacagaaacatacacttaaatgttcattgtaactttattcatcatagccagtacctgagaacaacccacttgttcttcagtatattaaacagagtgtagtacatccatatcatggagtactactcagcaataaaaatgagtaatctgttaatacacacaacttgaatgaatctccagaggattatgtggagtagcaaaagctcgtccccaaagggacatattccattttgtttaatcccatttatattatcattcttgtagtgacaaagaaatggagaagaaattagtgttttccagggctgagggtggtggtgagaaaacaggagtgctctggatgcaactatgaaagaacaagaggattccttctagtgacacaattgttctgtatcttggctgtattgatgccaatatcctggctgtgatattgtaccacagttttccagatgttatttggggaaaatgggtaaagtgaacacagtacccctctgtatcatttctcataactgcatataaatctacagctttctcaagataaaaagtttaagaattttggttttgcatacaaattctaaagcagctggaagaaaatatacccacgattaataattatttaagtattccctcttgacggcatttggcagtagtcttcattttcaaaaacctattgacatagctaatacattttcaaatagattctttatttttaaaacaatacaaaacttttttttttttttgagaaaaaagtctcattctgtaacctatgctggagtacagctcactgtagccttgagctcctgggccctgggctcagacgattctcccacctcagcctcccaagtagctggaaccacaggcacatgccaccacacctagctaattttccttatttatttattgagatggaatgtcactctgtctcccaggctggggtgcaatggcatgatctcttggctcactgcaacctccgcctcctgggttcaagcgattctcctgcctcagcctcctgagtagctgggattacaggcacgtgccaccatgcccagctaattttttgtatctttagtagagaagggttttcaccatgttggccaggctggtctggatcttttgaccttgtgatctgcccacctcagcctcccaaagtgctgggattataggcatgagtcaccgtgctgattttccttattttttttgtagaaaagaagtctcaaattcctgggctcaagcaatactccccaccccagcccccgccttggcctcccacagagttgggattgcaggcatgagccaccatgtctggcctcaaatagattcttaaaaagcaacttgtattttaatttagtcaaatcagggacatctgctgcttatgcagtcacttagaacatcaatgccaattaagaacattttgattgagaactaatcttcaatttcgcagttcagaaattatggtagggttttttccccccctagattagattgagatataggggacacacaccaaatttatagagaaagatattttaaaaattgttgacctagtaatattagatgagatagatgctttaaaagtaattgtgaagcaagagtggtggtgtgcacctgtagtcccaactacttgggaggctgaggcaggaggatcacttgaccccaggagtttcaggctgcagtgagccatgattacaccactggacaacagagccagacctgactctaaaaaaacaaaaaaaagtaactcagattttggggttcactaagcaacttacctttgtttcagagtttatgaatgctatcagtagttttaagggtttttttttttttttggtgtgtgtgtgtgaacacgtttagttttattgtaacaaagcttgtacactttcaatgtttaaaactgagcatcatctttcctttccagtgaaacaaagagaaaatttaaaaataaacaagaacataattacaatagagaatgttaataccaagtaagaccctacaggttctgctgattctcccactgagtggcagggcccaagccatcattaggggaggatttattttgaaagtgtcatcttaaactgcaaggatgtctgtcagatatcacaattaaacatgccaaaggagaaatcatattgtcaaaatgcccacttaacccactgaaacgtctcaaactcaccccttgctgaccttctataaccccattgtttaagttttttttttctttttttaaacaagagaaaatagacagatacatgttggtatatgctaactgtccatattcacatagagacacagtgtgctctctgatcccaatatacagagaaaggaggaaaaaactagaattgtatgcactactacacagggacttagcaccctccagattccagtagcgtgaagggagcaggttttttcttttttcccacagagcttgggggtgttgattccatatagttcagacaggaagggataaaaatgaattttgaacagaaaggggtagagactcttttcctgttctattctgctcaaggtattttctccaaaataagttgagaatcatggtgtagagaaaagagacctcaagaacagggtgactgaggacaagattaaaaaaaaaaaaaaagactgcagcttgctcccaaggactggagaacattttaaaaaaggaaggtcggaatccatcagtgttctattagtcatcttctccttcatcctcctctctttcctccccttcatcatcttcatcttcttcaccttcatccttatcccctacttcatcagtatcttctaatccttcctcctttgcgtcatcatcgtcatcatcatcatcatctttttctccttttccttcttcatcatccatatcaggaaccaagtagtactgtaatggttttggccaaatattgtctttgatgaactctcctaactcatccacacctgcatcagaatagtcagcaaatcaggtaaagaagctctctggaccacctcctgctgtgggacccaaggagacatctgctcctgcaggcttgcctaaaaagggacaagaagaacagtaagaagcaattgaacacagtgatgaagtacaaaatgaaatagacttaatgtgaggagattttgaaagtcgaatagaaatgtaacaaactccgccaaccactttttcagaagaggtcagaactgatcgccaacatcccaaatttgggggtaacaacatttctcaaccatccaccagtgttcgcactgcttggggagaaggacgaagatgcactgcattatttgaccagagttgaagtgacagaatttgaagatattaaatcaggttacaggatagatttttattttgatgaaaatccttactttgaaaataaaattattcccaaagaatttcatcctaatgagcgtggtgatccatcttcaaagtccaccgaaatcaaatggaaatctggaatggatttgacgaaacattaaagtcaaacgcagaataaagccagcaggaagaggcaacatgaggaaccagagagcttctttaagtttttttttttttttttttttttaaaggagcgtggatttaacactgtaaaagtggcatgattttagtagatacgtaatcttgataaagtaaatgtcttatgaaccattcctgcctaaaaagttctaatattcctataatttgaaagtttgcgctcttaaactagtgtttgtttcttcccaccactgctaagttagtactgattaatgcatattagtaagattagtaataatgtttgcttttactaggcatgatgtcaaaaatgcttttttccaatatgatttctcttgaggtttttcttgtgtttcttcagtatatcctgtttttcataattcaaaaacttgtcacgttgcttgtgtttggatattccctgactcttcatcaaaaaagcatttgcaaactatgtcttagttatatttatttcttctactaactaatgctattcattatatgcttgtattttactttgacatgccctctttatcagcttgagagctgtccaattatagacaattctcatcctaaaaaattcagactctagacttggaaaggacctcaatattatagtttaatctttagtcttttctttagcatccctaattcacctttcccttgaaggtcttcagaagatgaaactgatcttgtaagatagctcatttcgtatttggacgggtctctccattagaaaattcttttttatattgagtttagaatctgtctaccaatttgtaacccatggaagctcacaaagccgatccaatcacttttctacatcgtgtgcctttgaatattataccctgggctgcttctatttccagagcttgtatttccattttcccccaattgtttttcctattgcattacttggttttgaattcttatttattaacaaacctgaatttgtctatatccctcttaaatgtagaatactgaactgaatgtactataccagatgagttctgacttttcatattatattttagtcagaaatttcttagccattgcccagtacaggaatgcatccgccacatccttgtttgctattttatacttgaaaagtgcaattgtgtcaaaatattttcagtgtattaagatttggtgctgttctgtcttctagactcctataaataatttgtatacaaggtagcaggggaaaaaaaatcactctttagtgacaattttttttttctaacctgacttaatctccattgagagtactataaagattactttttttttttaaagccccagtatatgtctggcaaaatcttaaaatcaatcatttaatttaaattggatttcaaaagaaggtcactagatgaaatcccttgctgtagttagtgaatgaaggtttatgttaaaggagggaaagccgaccacttttatgtttttaacgggctaaattgggaacttgtcagtgctcacaatccagttcttcaaaattataaaactaaacttgaaagcaccctggtcacctctgacccactgtggaacacggtgccccccattgaagaggaaaggggtgcagttcttttcaagtagagccacctgcagtcacaggtgttctccgcaagccttggcgcttcagagagctatggtatttttgcttctgccagccattgtgatgacagtacctctgaagttcctgggccatattcaaaccttgtctctcaaaagccacattagaaatatatatgccacccccaatttctcaaaaatggtgttctttttcctgttttaataagataatcaaccttcaaataggtcttttcttatgaagtgtttatggattatgagaaacaaatgtagaccttttgtttatgaacatggacaaaattttattcacaagaacatatttatcttcaactacttagtactctttcaactttaaaagagatacttttcagtttattttaaaactattgccaaagactagcaagtgtctgtaaaaggatttttaaaatacttcactgattaacatgctgtatcaaaggtcaaggggttgtatccttggatgatgatagggagagttgctgacttagtactgctattgctctagggtaaaactcaaaatttgaaccagtgggccagacatgtagcatcatgtagcatcataatagttggaaaagtaagataatttggagaagactttatacttcagagcaatactaatttttgtgtaatccattattttcttgacactttcacatgtttctgtgcctattgcattatttcctcacatttgtatctttattgattttaaatacctttttactcttttttcctcatttatccctcttgtaactggctgtgaataaatttcaatcacgtttttatgttagtaacaagtctgagtgccaaatttgagctctacgagactctattgtgagcaatttatatgtttacaatctctaacgtctgcactaaaatgttctaatactgcaattctttccaaagtaggtttgaccattagcaaccaacaatattaacagtgaaacactttgtaaaggtataaatcaaaagagaaaatttgtgaataagtgggctctagaaaaggcaattgccataaagtccatgagctgcttgtgacaacatccaaagctttattaacttcactaatatatcaataacaagcaaaataacaaaagaaagcaaaaaagcaaaaacaaacaaaaaccaaaaaaaaacccccaaaatcctagggagcaaacattagaaaataagattttagaagtatagaaatatattacctgtaatcattggtatattttccgtgtctgagagtaaaatctgactttaaagttttttttggctttgagctgtgtttttgagggtgaagagacagacagatgtagaccaatgttccagtccttcatttgtttgcccaggtgattttggaaaatcacttaatatctgtttcagtttcctcattagtaattagaggataataactccttgaaggggttgaggatatgtcatcccaaaattggccacgtaggcatattactggttttgagttttcagtaaaaggcacttgaaaaacaggcacaagaaggacactttcattccccttttttcttcctgaaagcagatgtaactcctaagagctgccctccttatgccaggaggaaagaaatgttcttatcaccagaggtgggactagaggattctgtacaaacagaccttgttaaaaataactctactcttcctttagtgtctccattcgttttagttacttttccatatttgtgattcttcgttcaacccagcctataagcattcaggttttgctacttctttgagtcaacgtttccttatgaaggctcttatattacataaatttgtatgcttttctcctgttaatccgtcttatgtcaatctaactctcagactcagctggataccctaaacaggtaaaagtaaagattttgactaccctctaccctaccaaaagtgtagtgagaaaattaaatatgattatatggataaagcactggacacattatggattcccaataaaggatagttttctcttttttatcccagcatgcagactgccagcagccaaaggggagaggaaatcatcttaaggagttaacagatatatcataactgacagttattatctcatgtatgtattgtttgggggtcattgaataatgttgtgggaagtgttcacaatgacagttctacatgtcagtgaaatagcaaatatcacaaacgtattccgtgacctttagtgaaggttgaaagaggttttgaaaatgtaatttaggagggcttttctgaaaaggagaaagatagtgttgcacaaataagcggctttcctaaatgcctgatttaatcaagtaataacattcagaatttatatttcttaaataaaatacttctcaagaagggttttcaatggaagaagcaccgtggatttaactagatggtgcctcccctttctttccttgtgcaaagtactgacatatggcatagctcataagcagagatgacaggggaggaggtggtagggttgaggttacaaattccttcttattggaaatcagtggtttagcataggaaagttgaacactgacccagaaaacccttgatagttatatgaatagtgacatgctgacaaagagaacatcagtttcagtgagtatccagtttagtgactttcaacaacatgaattttggtaaaagtggatttagtcctaaggacttgtggggttaatacacagttaatcttagatgaacaggagcataacatttcttgtgtaaatctggctcttcttatctgtgatcttcatttatctatactttttatgctgtcctacgataaaatttagaaaataataacaaatacaaaaaagtaataaatgataaaaattctaacataaaagttgaattaaaataaaacttaagtgttgggaaattcaattagaaaagagttaagaaaaaagaattaaattgttaccaattgcataatggatgacattttagacttgactaaggtcaaataaaacgatttttaaactgggaaacattttgacaaaattacataaataaggtaatattatgcaaaagaaattaaagataaaatacacaaatttcaaataattaaaataatatgacaagacgaatagttagcagaattaattgccatatttatttatttattttttgtttttgtttttatttgtttttgagatggaatcttgctctgtcgccaggctggagtgcagtggctcaatcttggctcactgtaacctctgactcccgagttcaagtgattctcctgcctcagcctcccaagtagctgggattacaggtgtgcgccaccaagcccagctaatttttgtagttttagtagagatggggtttcaccatgtgggccaggatggtcctgatctcctgacctcatgatccacccaccttggcctcccaaagtgctgggattacaggtgtgagccaccactcctggcctgccatatttattttttaaataaactttatgaagaggtaaacaatagtttttcccccatttttagacagcaatgactatcagttctaaaaagaaacttttttgaataaaataacaaggcactgtgaattttaaatcattttgtgaggtctaaacaactttttcttttctgtgcatgattgaccaaaatgaagtgaataaaaccataaatggcaatatggtgtagcctgcagaacaatatgtgtcattcatttcttcagtttacaaatatttaccgtatggtttctaagcaccaggccagctgctaggctctgggaatacagcaacaactaaataaacgtgacatctgtacatctacagcatagatttattatattgaggaagattgataatcaatttaaaaatgctacataatagcacataacttaaagtaaataataataaaccacgaaatgatcatagtgtcacataaatgctaagcaaaacataaccaaaagtgatatggttggcagagtaactgggtgtccagagaagtcctctaagagatcatatttgcgtgaaatctaattgacatttggctagggtctgactcaagggaagagaattctaggcagagagtatagctggtaagaaatacctatgtctgaaatgagcttgtctgtgcttcaagaacagaaaaaagggcactatagctggtgcttagtgggcagtagttgaaatattagactggatcagattatactggacctgtaaccaggactgtggactggattttattccaagtgaaatcagactgtgttaaatagcgcagggtcttcctgcctgggcaggattttgacctgaacataaatcattattctcagtctggccatacactgtacatttgcaaatgggcatggactttgatgacaatgtatagcacctggtgcatggttttagcaattcctccgtgtcattatatatgaagaaaaaccctaaaagattccatggaactttaaaaagtatataacagttgaaagaaggctcatttttaaagcatagactgaattctctaaatttcatcagatatcttgatgttttggggagcatagacttttatttcctagagtgtgcatcactagcattgtaaacgcaaggtttcttctagtattttgttttgttttttataaacacatcagtttgccttttactccagaatatatttgtttttattttaccatagaatatctgtgtaaattgctggcaagaagcagatatatgtagtagttaacagctttgatcctgcaataagagacctgaattcattggccagctgtgtgggcatatgaatgttacatactaacagtggtaaaatgagaattttaattgcaggggtctgcaaaggatattgcttgtgggccaagtgtgagtgctgcctgtttttgtaaataatgttttattgaaatatagccatgcccattcctttacacatcgcctatgtcctctttctccctaccacaactgagttgagccatgcaacgctgagaccttacatggccacgaaatctaaaatgtttttttctagctctgtacaaaaaagtgtgccaatctctattattatgtgcacctttgagggttattgagggaattacatgaaataattcatgcaaagcactcagtacaaggcctgccatttatttagtaagcattcaatatatatttgtaagtattagaatttttacacattcattttttactgtcaaacaatcaggtcaaattgactgtcataaatatgcactgttatgtgcgtttccatgtatctttagasgtaaagcacccaagcttgagaagtatttgtttaagtagccatattttggtgacacttggccatttctgcattaataacatgcctggatgttggaacttctattttggccactagtttatccttaattcggatattataaattatatatatgtaaaagtttttggttatattagagcaatatgggtagattgttaaattaatcattgcagaaccctttgaaagtctaggcagcaatgtgcaaatgcaaaatttataactggagcaaacaaaaagaagctgatgattccttaaggatattgatgtttttttggtttcttccttttgttgtcatcaccagagatttatattacatttggggaaattttcaatatttaatcataagcatttttattccaatgtaggccatacattcaccaatatgagcttactctcactagaggctggccatatttttttttgatttaaaaaaaattgaggcatatgtttgcatgaatgcccatgtgtgttaaaacttctaataaacaatacggaaagatgatcagtgaagaatttaatgattttacttcttatggtgttaaacatgttatgaaaggtctctaaagagaaattgtaagctgtggggggaaaggaagaaaagaagaggaaaatctattatttgaacatttcagttaaataatttcttacttaagttttcctcatgaaaataccacttttgtaggtttccaaatagtatcataatcattgcttatgtgcctttattttagtgaagtaaagagttttgttgttcttaatttccagttccatttccaacgactatgaaaacattatttaactttatatattacttttcaatttgtttatttttactgcttcagagttaatgttgtatttaaaagataaattaatcccagcaatttgggagaccgaggtgggcagattgcttcagtccaggagttcaagaccaggctaggaaacatgacaaaaccctgcctctacacaaaatacaaaaattagcctggcgtcgtggtgcactcctgtcatcccagctacttgggggctgaggtgagaggataacttgagcccaggaggtccaggatgtagtgagatgagatggtgccactgcatatcagcctgggcaagaaagtgagaccctttctcaaaaaaaaaaaaaaaaaaagaaagaaagaaaagaaaagttaatattttatgtgaatgtcttagctttctatgtacattattaatttagttcaggtcagtttgtttgaaactaatataaagaaaaggcacaagatacggttcttaacgtttagacaataatttatgattatgttgggaaaacaggacttacttgcatgaaccagtttgtctcttattgtctctcacatggcattcatataaaaaataagaagattttgtgaaccttgagctgggctatcaattgagattgtgggattcggtgctggttgaatttggttttataatatttttgagtgtggatgtcatttttttcaggccattactctatcattttctaaggcacatttaatgtcataaacttttgtgtctgtattctagtagaatatagtaaaatcattcaaattagtctgtatgctaaaactcagaaatgttagccttgmattaatttttcagtttaaatttaaatttataggctgggcatggtggctcatgcctgtaatcccagcactttgggaggccgaggtgggtggatcacttgaggtcagaagttcaataccagcctggccaacatggtgaaaccccatctctactaaaaatacaaaaaattagctgggcgtggtggtgggtgcctgtaatcccagctacttgggaggctgaggcaagagaattgcttgaacctgggaggcagaggttgcaggcaagattgcgccactgcactccagcctgggtgacagagagagactgtctcaaaataaaataaaataaatttaaatttataaaaatatataagatggagatcaaataatctggtaccctcttttcaaaaattatcacactgattttcagagagattatctgtttatatactgatttttcaaaattggctagaacataattttcttgacttctaattcagtgttatttcattatatattacaaatgcttaattttcattaagtgaagtatgacataactttctcatgaaattcatcaagtcagagtacctgatatctttatttttgcaaaatcgtatataaatatgtatatttaatgaattataagcaattcctaggattgcttgacaggcttttacatttgcttctgcaatcaagatttaagaaggaagagaggctaacaaagaggaaagggagagaggagaagaggttagaagaggaaaatggaaggaaagagaataagagaccatatggatagctagtttaggaatagaggagccatagggagtaaggaggaaaggaatgcattctccaggcagagagtaagcagagtctgggctgaagacgacaagaattggggcatgagtcagccaagaaaagatgagatttggtgcagaaggagtatcgagtgagaagtttctagatatgtgtgctgctggaaagactgtctcaaaagtattttctttgaatagaaaaattctggagaaatgtgattaaaacaagaaagaatagttaagcattatgtagggagtcagtcacacaaaattaacacataaagaaaaatgtcctcttcttatttcttcatcctctcttccttttatttctgaatgtttctgtccctctgaaacttgtatgttggaattctgatctctaaggtgatcatattaggaagtggggcctttgggagggctccacgctctgaatgggattagcgctcttagaaaagggaccccagagagctccctcacactctttctaccatgtgaagatacagtgagaagtgggcactttgcaactcgtaagaggaccctcatcagaatctgaccatgctggcaccctgattttggacttccatcctccagaactatgaggaataaatttttgttgtttataacctactctgtctatggcaatttgatataggagcttaaactaagacaaatggttaatttaatagatacctttccacaaaatctgattttgttgaccatgttgaatctatctttaaaggaagtcctatgttaacgactacactagtgaactgatagtatgtaataaaaatatattcctgctgtgcctgtcaaaagtggattgagggcttttcggaactaatgtaagatgatttccaataactttgaatgagtgttatattgtccaatttatcctgtgggtttcaactttcactctcactttctgagaagcttagcttcacttcctcagaatagattaactgtttctctctcaatacagtctcatactcccatatttattctttgtgttattaatcactattgtaattaaatgtgtttgtgttagtagttgtaaaatgtctgtttctcctgttaraccctaaactccacacaaagtgatactttgtatttgctgttcatagctgtgtccctagcacctggcattgtgcctggtacaaagcaggtagttaagaaatgcatattgaatgtacaaataggtaaataaaataaaactctaggaaaaataaatgctgaatttaaaaaagggattatttagctttgatgttagcttaaacatgcttatctttatgatttatttcagtatgagaaaatcacaactaatagaacacattgatatattacagccataaatgtaatttatatgtaatatttaaacaaatattcaaaatttgtttattatttaataggaactctcatggattggcagtataccaagcactgccatcacgttatacccattccatttaatccccattcaggagggtgcagaaattatcttccattttacgttgtggaaaactgaaacttagagaagattaatacagctagtatgaccacatattaaaattatagatatgtgggaattacagggttttaaaagatgttgtaccaggacaattgccaaaaacaagaaataatttttaatgtagtcatgctgaatgtggagtataaaattgcagttaagaggtgaggtttttagattcaraaggttgagctgcacctgtacctattacctgagtgatccaggacatggttttttaacttttctaagcctcagtttcccaaaccataaaatatcatttcacagccttattaaatgaggctgtgtaacaggtggagtctggaagctagtagacacttgatgactttgaattcctttttcttttctatataatatcacatttcccctttctattctgctccactccagtcagcccattgaaagctagctccttttgcttgtgggaatgtatccaaatataattagaaacatatatattatttagcaaagctagtgcaaattcaaataccattgatgagtgatgttcgaaatttaaatataatcaatagcagaccctatatattttccttgatttcccactcctagaacacacacacacgcatgcatgtgcacacacaccattcattttttgaagaactaggtgcctctatattttcacctttccctacctcaattgctgtacagctagtttttcccagttcatctcctctctaaaatgcttatccattttttggtctccaagtacattgttgcatctttaaaataacttctgtagtattatcctaaatatctgcatctttatatacattatagtagtgttttccttgaatattgtcctaaaatattgttctgaggtgatagtgaaggaaaatcctgttgtagtatatttaaagtcagtagtctgtaaaataattgtttcagactggaataaaaatcagttcccagatactttatgtttgtataagatctttattctaatttattttttatgctgattagagccaagcaccatggctcaggcctataatcccagcactttgggaggctgatactgtttagatgtatgtatctctgtaagttgcctcaagtcatcatttaaaataaaactggctaaatataagtaaataaatacatacacataattataaatttaagtgagataatgggaaattatcaaatcgaggggtgtattttttcaatcataaaattattataatagcttatttagtcatttatttatttatttatttatttattgtttttgagayggagtctcactctgtcaccaggctggagtgcattggcacaatcgcggctcactgcaacctccacctcccaggttcaagcaattctcctgcctcagcctcccaagtagctgagactacaggcatgcaccaccatgcccagataaattttgtatatggggtttcacaatgttggccaggatgatcttgatctcttgacctcgtgatccacccgccttggcctcccaaagtgctgggattacaggcatgagccactgcacccagccaatcgcttatctaaatatgatagttaatctattagaaataaatcagaagggaaaaatgaaaaaggagtatatgaattgttaatgtttccaaacttttacctttaaaataagctctttaaagctgattaccaattatggtattaatatgacatttgtcatgatgtatattacctatgttcaagtcactgccacttgatttgaactagtcattagctttattttatagataaggtagaattttttaaacttgtttgaaaaacatgggtgtgtgtgtatatacctatgtctgtatatatgtacagtcatgtaccacatgacattttaacaagctaccacatataagatggtgatctcataagatgataatactgtgttttactgtaccttttctgtttagatatacaaatacttacccttgcattacaattgcctccagtattcagtacagtaacatgctatacaggtttgtagcctaggagcaatatgctgtataccatatagcctaggtgtgtagtagtaggctctcccatctaagtttacataggtgtgctctattagagtgggttattttttcttttacacttgtctttttccatcctatccgactaatagccttcacttttgttctcactgctgtccactgtcaattcctacacacacacacacgcacacaagcacacacacacactttatgtacatacactcacagtcacagacacttcaggtttgccttttgtgaatcttacgtggcagataaccaatttttaagaatgcaggttaaattagagaagaacatgacttggaaatttctcaagtattttattttttagtaaaagtctaattggaatcatttagccttaaaagcaccatatcatccttttctacttatttcctagagaatacctgattggaattacatataatacaaatagagttaattttaataaagtatttaatatgctaagtacaatttaaggccttatgggaagaaaatgctttattttgttaatggatatagataactggagctcagtggatataatctgattaaacaatatattaatttacataaaataaagttgcacagaataaaatccagaaaattatgtgatattgaaaagaaaacttcaaaaccataatttataattacctacattctgaaatttctattattacaaatttttagtagttgaatgaacaatttatctcactagttttgtgctactcattatttaacagtatttgaaattaatatatacaatagcctctatataattctcgtgtctaaaatccagatacactttattattgatgatactgttatctactactagatatgaattactacttttcaatcatttcaagttttctcttaattccaattggctgagtttgtaatgtaacttatacaaattatgagcaaaacataatatttttaattgttggttaatttaattaaaattgattaattcttttaattttaaaaaataaaccaggtagtttgatgttacctgttattatattaaacattgacattttagaatacctttgtaaaaatgtcatttttattataatttaagactttttttggcattctatacctttctcatttttcctcacaatctactgcctcgattgaaatacatagatcaaaacatgaggtttttgattcgtggttttatgatgtactgtttaatacccattcagcctaaaagcctatggaatatctaagaggaacatcattttttcctttatatttttttgatatttagccattgcttagtaatgtctcttatttattaatatacaatattagtaggtttagtaacatccagtgaactaagttgcaaattttgaaaatctcagaggtatttttggaccacaaataaatagaacattaggcaaataagcttggattacaaaatgtaatgtcattaaataaatgtcattatatttgattatagttgctcactgagaaaatttgtctatgtttcattataaagattattggcagaatgtaagacaatcaacagtttttgattttagggatatttcctaaaaaccttaatattggaattatctgtgtgtgacaaaatttccttaataaatcctcattacttgattacaggttgaatatttcagacatctaagccaattagaatcatgattgttttgattgccagaaatccttaaatgtatgtattatccatcgatgtattcagtttctatattaggcacctttgacttaaacatttttttagtggtttatgattcaaaagaaagtcaactgcatttcattattttttttctggatattacagattttgttttgctccaaaaaataaattgggagtgtgctaatcaattgactatgcacagtgtgaatagcacagtgctagtttctaatatatgtgttaattactttaagatataaagctaagagctaaaatgggctacttcttaaacacattcattgtgaccaatgagatatatatatatatatatatatatattttgagatatatatatatatttgagatatatatatatttttgagatatatatatatatttgacatcaccatctaaaagttagcatctagctcctccaattgttcagaaattaggcttctggacagtaagtggtttgtaaagacaggctataaaagctgtaagccaatggagtaatctaagtcctggcttgtctgttggaacgcaccaaaataaaactgtgtcttaaattctgctgtatatttttatgagattctaatcwactggatatatcaactgtgttatgggctgtttgatgccattttgaggtagaaaaagtaaattgccttttttattgtactttttaccagacattgttatactctgactcaaggcaaaccattcagttgaggtgattcagttcatttactactagagagaacattgaacaatatttctaattcagtcacaatctggaataattcataactcctctttctctcaacaccccaaaaaaggaaaaatggaatttatgagctttgaatttggaaattatgagagtagaaataatattgaacatctttcagaaatcagtattttcactggtgacgtattctttaagcttgctctatttcaaagacaaatcttagattcagtgatctagttcattcctgtatgagattattgttttcattctccatgtgactgctggagggtagggtgcagaacagggtacctctgctggatgtccttacatacttggatctttaatgtatatttgagaatcttccacttgattttgaggtctgggtatctgtgacacaaaatgattagggaagaagttttttctccagtaatgtgtcctaagtattttataattatatccaaaaaggttgtgcttttgtgcagaaaatttaacatagcataactaagactactatccttagaaactgacaattcattttttcttatgcaacaaaggctagttatttataaaatgttayccttataagactagttattttttgcataactgatacaaataatctagttttagaaaatcgacttagcggggagagatagcatttggagatatacctaatgttaaatgatgagttactgggtgcagcacaccaacatggygcatgtatacatatgtaactaacttgcacgttgtgcacatgtaccctaaaacttaaagtataataaaaaaaaaagaaaattgacttagccagagaattaatacttttaacttttgctttgcacttgctgctactaattttaaattttatatttggctttttcctagatccatttcctgatatttggttaaaaaataaaatttctaaatttttattctttactattttgtcctacatagtttactctcataaaattttgtctattgtgtttcattaatgattcataaaatataaaagaaattaaaagcactagaaatttgacttatcactttaatcttgtagtagtttttaaaagactttatgattttcagacaatgtgtaagagtatttcagagatctgaagaatagaatacagtttctaactcatgagaactttttaattaggtgctccattgtcactattgtttcttttctgattatcacaggaatttttttgttgttcatacatgctaagaatctgtctactaacatagttattcccaaatgtgtctttttattttaatattttaaacacagtttatttcctgttttggtcaagagtagaatagattaaatattgtagtaaaaggaatcaacaggacttgcattacctttgactttagtgaaacctgctgtgacactgggcaattctttctattcagtgatcaggttcacatcctttccctcttctgtgtttcactgaattgcaatataattcacttatctttccctttacttagaagagtatattcttttcaaaaaattaatttcaaaggattatttgtatgcaattttattcaagtcttctttctgaaattctcatatagcaaacttgttacaaaatatcgatatatgcttggggacagggaactctctgtatcttcctttcaatttttctgtgaatctaaaactctgaaaaataaaatttattaattataagaaaactataaacaatatggtaatgaaaattcctatgcaaaatagagtgattttgattttatacagttctattatatctccttgtttctattcatttcttctgttaaacaggatttcccccttaaaccgtatgaacatggaattatagaatcataagcaaatactaccttcaaggttgcttaaccttaaaatcttgaacctcctgtctcccttttatatctattagattgcttggatttcttttcttttttttttttttaacttagtaaattttcgaaactcaaagtaacttatttaaaacagttaattactaacaacactcatctttccccaaagtttggatttacaattctgaagttaattttgatgacttaatcttcatttatgtcagattattctttaatatatggaaggttttaaaaatacatgaatttcgactggggtaaagatttgtgtacactattacggagctttgtcattaaactaaatgaggtattaaagtcttaaaaccacagttataataagatagagaactcaaccataactatatgactaaagaaaatactaattgatgatgcctttatttcaactgtccaaaacagacttgtttcgtgtggtgtttttaattgagttacacagtttctttgttttccctctctttttatggatgtaggactcttaaactcataaaactttgtactttattacacatgtggtttttggtaattaggttttctttttttaccttcacgaaacaacagtctagtcaatgtaatattgcttaccatgtggttgattttctgtttttatcttttactttttattctgaatcatatctatttgaaattgtagcatgaggaaatattttaaacaaaaagtcattgaaagtactttttctactgataatgaaaatgcattttctgaaaggagaaaaatcacataattatggttataytacatgaaaatcctttttaaaaattcagggactggtaatagattttattcctttgcttttttcgagcactactatgtagtaatcacttttccggttgctgagaacacagcattgaataaggcagggtctctggttttggaattcatgttaaaaaatgttttccctaaattttcttagatattaagtgactttgtggactataaaaattaataattttccttttagaatgagtttcatcaaccaactgagattcttgttagttttgtgacttttatatatgttatgtttcttgaacattatgattcttgagatagagccctataattttagttaatagcaaacatttataacagttaaggaaaatgctcttcacattttgcttaaatacatatttctcttatattttagctgggaarttttaagattccttctgtcaaacataagatggtggttggaagaatatcgctttgatggatttcgttttgatggtgttacgtccatgctttatcatcaccatggagtgggtaggtaacctgatataatcaggtttggggttaattgcagaagctgcaatagccattactggtgtcttggtttttattagttccattacatatgctttctctgtagtaatttattatcccattttggcaaaaggtagattataagtacattttataagtaaacaraaggtaatcatttcctttgaaatatatctgctgaatatgctataattcgtgtgtagcttaaaatttttttgaggaaaccatttattgtaacactctcaggatgtgaacactacagcacttccaatgaaaataaaaaataatagatgagaacagttgtgaatgcataggtttttacatattacacattgaataaaatatgtattttaattgcagatttacctggttaaaattaaattataaattaatttgaaattaaaaatatttatcagactctcagcttaaaagttgtacaaagaagtagaatcacagaatactaatccctcaatagatgacatgggaacaattattattattattattattattattattgttcttgagacagagtcttgttctgttgcccaggctggagcgcagtrgtgtgaactcagatcactgcaaactccatctcttgggttcaagcaattctcctgcctcagcctcccgagtagctgggattacaggtgcccatcatcacacctggctaatttttgtatttttttaatagagacggggtttcaccctgttggctaggttggtctcaaactcctgacctcaggtgatctgcccgccttggcctcccaaagtgctgggattgcaggagtgagccaccacacccrgccaattattattattttttaatggccaaatgttcactagcaataaacagaaaaaaagaaaaaaacaaagggggtgaaaaacrtgactgtaaatcttgaaaagygactgccaaggaaagaagctaaacattcaaagtgtgctactgcttgatcttactcatgatgctgcccacttgaaatgttcctgggaaagaagttgaatctgtaaaacacaacagattttattgatatccattttccagtttcggggaagctgacttacggtatgcaaaggcaaaagttaagaaaaatcttttcctagatttaaacacctacgtgcccctgcagaaactacctcaccgagagaggagtatcttccaagaatttgtggtattagagaaatgaaccaaagtttatggatatgggatgtgctttttatagatacagaatccaagaaatggttaaagaaaaacattctgagttgtttaacatttttttcttccttggaatgacagagaaagcaacaaacaaaatccctgaaaccgcacagcagaagatcaaatagaataccagaaaagttgagatttaaggcagttaatatcaagacacagtatttgatttataaactcagtaataaagggaaatttatcaggaggtcatgaatttacctgcaatttacttgcatgcatgaaaaaaaatggttggactcatagtattctatttacagaagcaatgtctgccaaattcttacaaagtgtgactcaaacatttgctagttgaatgatggttgccaggggctgaggagtggaggaaatggagagatgttggtcaaagggcgcacttttgttttaaggtgcataagctaggcggaatctaatgtaactatagttaataatattacttggtatttgatgagagccaactttaagtatcctaaacacacacacacgcgcgcacacacacatacacatgtggtaactatgggtggtgacagttgtgtcaatttgagtatagtaatcagtacacaatgtatgccaatatcaaatcagtaccttggaaaccttgaatatatgcaatttttatttgtcaattaaatattttaaaattaaagaacgacagcatcaaaaatgagaaacttggtagttatattgctgctgaaatataaacatgaaagaacttgaagtataagacttccataattatacttgaaaatatccctcagtgatagaatccagcaaactgagaaaaaaaaatcaatagaacttagatgtagagaaatggtaaaaggctgatattgagcacaaatttgattttattataacaataagagtaaattactgaaagaatagaaagtaaatggtataacccaagtaagtgaaatatactataaccaaccaaagttaggatgtgagagaagaggaggtaggaggaagtttgagaatatataatctctttatcatagggaactccatattgcataaattgaagtgtgtgtttgaaataatatataaatattatgtctcagttttatgatggttttcctattttcttttccttacctcagagggatctaatacaaactaacattaacatcttaatgtgacagaaaatgtattgacaattatttgatatttagaattccctttagtatgatttcactttttgccatataatttagctaaaattaaattaaatctttaaagtgctttgtttttctcatgcgtgtgcatttgtcaaacaaaattgatttgcagaattgtctgaactctgaatgttgacatgtagtacttttctaagtcagtatatttgctgatgcttatgttattaaactgctacaataacaaaattcatataaacaaactaattggtgaatgtatttgtgcagagttaagacttgcttgttaacataatatatccgtattgattttctttttctaaggtcaaggtttctcaggtgattacagkgaatatttcggactacaagtagatgaagatgccttgacttacctcatgttggcaaatcatttggttcacacgctgtgtcccgattctataacaatagctgaggtaaagccatagtgaagtcttaccttctgaccccctttaatagagagtattttgtcagcatacagtatttgattaatcaatctcatgttgtcaataattgcgtaaatgaaattctaccctgagtatagtgcagctatcttgtatgggtggcacattatttagaattcactgtttccctattagaagataatgtatactaattacttgtcaccattctgttgttaaaaaagaaaatgccagtggttggagagttaaatgtcctaatcagtggacaggcccttcgctatgagaccttcagcagagaaaagaattgaatattaatgtgtgtctgtccatttattattatttttttcttttttggctcaatcattaaagataggatggattgctgcctgcaagcttctctgaagcctttcttgttctgatgtgattacctttcttgtttatgttattgctctcagattgccaaatgttcactagttattcatgattgttgaaggttcatgattaactgtcccaaagctgcactgtaatgatataattccatatatgcataattgacaattcccctcttggtgataaatgtgataaattaagaagtttgttaaatgcttatgctaatttagatttagtgctaaaatccctctggttttctaagttctctaactaggaattattattaaaattgaatttagcatgttaaaactgttctatacaaagtatagtggttgagrtataaaaatagtaagactactgttaaaaatagttagaattaaggtgtgtttttacattgttggtgtttagcttattggcatgaaatggaatagtctccttcctgtagtatttattttttgtatagactgtttttatatccaccatttctcaaaatcagaaatctccaattttataaatggtatgatttcaccgcttggatagaggagaatagttttattcccttcaggcattttactttttaagtattttctgggaataaagcagtagccctaaattcctgaaattcgttcttatatacaattaaaaaacaaacaacctaccatacaatttagacacccagtattttttcacagtcatgacctacctacgtttgatcatagcacatcttactaatacttgtgctaatattttttgtgctgaatatctttaacatcaatcagagtgtattttaaacttttgccttatgtatatttgaattttatatgtcaaacatcaaaaaattaattattttgtcaatgatatttatggcaatccaaagcagagatattacaaatkacaaattactacaaacaattaatgacagcacaaatcaaaagtgagtactgaagaaaaagaagcaatgatttaatacatgaaagttaaaattgttacattgatctttccattcatttcaagtaaaatagtttcatcatctagggagctctggtctgattatcagtgtttctaccaatgaaactttgagactttagcctactttatattacttggttttagattttttttttttttaaaaaaagatgtgccttcaatttattccacttaaattgaaaactacttcaatttcaatacgtcacttttctgtctagcgggagtctcttccaaatgtagaattgatccccatgaacttttttttttttaagaaaaggaatgtatttgaacgaataagcaatgtaattttatttaaattcctttagtagaaatatgaatttatttataatgacaattacaaaaattgcaaccttattttgctcaagtttatctaccattttacattattatatttgctatattaattaaaacatttttgattgatgtatctttccctctggaatggttataagtgctctttagatagtaaaaaattagaactattttaatttcatcccaaacacagaatcattttcatatgccatatgaataggcatcaattgttttatatttagagtatgtttattttgatgacctttatgatttaccttttttttcttaaaaattttaaaagaacagtcacaaactttccaccttcaaaaggagggctgaaacaactcatatgcattaatgaggcaactttctagaagtcagatttaggagtcaagactatatgattgttaccaaatcaccaggggtttagtctaggtcctgctgcttgctgcacagaaagccaatcacggagacaatgattattgccgtagaagaaggctttgatcagtctcaaatccatctctcttaccaactaaaattagaggtttatatagtaagaaataaatgtaacaatgtgtaagaaaacagaactagagaggggtaaggaagcaatcatgaggaatgaccggtctggcatctcattgcatgccatgatttggtgagcttcagttctttgatacttttttttgagaagacttgagggacaaatgtaggtttcaagcttttcaaaaggattcaattctatgtttatccaaaaaaatatgtctatgggatgtttgggtttcatgattaccatatgtttttcttagcagattctatttcctaaaacaacattgggactggatacagaacatgccttaatattttcttgagaaaattcatcttgatctttaataccagtccatcaccagtcattcttgacagtttggtctttcaaaactcttttcagaaggcattgtgtctgtaattctagttcctaatatggtgcctgatatttaatgcatatttatccaatcctgtctgtggaaatatgacttatattttgataaatagaatgattgaaatggcttcttttctactgatcttttttctactttataaaccatgaagaactatgcagaaataagattactggcaaacattttattttcttatggatgtattctaccatataatatatttacttataccttccttccataagaaaaaaaaaaaagaagcatttgacctgagtcttagagagcctatggtatgtgatagtcttttataggaagtaagggtcataatctaaggaagactttgggcattgacagatgcagaaaagctcgtaacaagtacatgcaagagggaatatttcaaagtggccgaagtacttagtaattaaaatgaaatagtaggaaataatggtggaaagatgtctttccatttcactttctgtgcactttagttaatgatcacaactacatcacatggtcatttcataattatgtttgtgtgtatttaggtcctagtttattaatctttgaaagtcagatattatgtcttatcttttaatccctcagagcacctcactcattcactcaacagatactgaataacctgcttgtgccaagtattattaaactagtctagattcttagggtatatcggtgaacaacaactataaactcttgccctcatggatcttacactataacagggagtaggggagtagctaattggatagtaaatcatatagtaaatgcttaatgtgtaattgttgaatcgaatcttaagctaaggaatttgaattttctattgttggctattgaaatccattgaagggcagtaataggagcggactgtctcataagatatgaatttggcagcagttagtataaagagaaggtagagatggggaatgccatttggatatggtctaggcaagcagtaatgaagattaaataagattgtggttgtggtaatggagcaaaggaaagtaacttatttgaaagatattgtggaattagaattgataatacttagcacatattttcctaaagttgtcttaatatcttttgttacatctgggtccctgtaccwatctttgaaacccatttttaaattacttttatttatttgattaattattggatacttattgtctagagtagaaaggaccccctgtcaaaaagcttgatatctgaatccggctctaccattaaraatcctctctctcgactgggtgtggtggcttgtgcctgttgtcgcagcactttgggaggccgagatgggagttcggactcccgtctcgaacggtcaggagttcgagaacagcctggccaacatgatgaaaccccatctctatcaaaaatataaaaaatattagctgagaatggtggtggacatctgtaatcccagctattcgggaggctgaggcaggagaattgcttgaacctgggaggcagaggttgcagtgagctgatatcatgccactgtaaaccagcctgggcaacaagggtgaaactctgtgtcaaaaaaaaaaaaaattctctatcttgagagatcccttcacctcaataaacctctgtttctatatctgctaaatgaagataatccctacctaatctcaaaaaccccttctaagtgtaacctactctagtaaaagctattgtactgtttcactgttaatgtactaactctacattccatttcatcaaaagctagtgttcacaaaaatacactccctatcagggctacatacagaaagaacaactataacagatttatgccacatgtattgttgtgcttggtgaaagcaacaaaactaataaaaaatgttttacagtagttcaaaaataagaaactatgttttagcaataacagttttgctattttgtgttctctaggagatactgaagaaaagaaataaatagcttcatgagatcaaagtttgcctggagtgaaaacattaagcaaaaatctttctgggaaatgagatatgctatcacaattttatcgacttttatgttaccaaagcagcccaaaaatatattcccctattattgttttcatttattgacctgggctttacagtcagaatatttactaaaagtttgatcattatgaaccgacgttctttgttgtaggatgtatcaggaatgccagctctgtgctctccaatttcccagggagggggtggttttgactatcgactagccatggcaattccagataagtggattcaggtaagagtccatgtaaatattttttgtttctgtgaatactgtgttgcttcatttatctttaatttatttcttagttgtaatcattagttacagatattataattgaagtattaaattctttcattagtctgtcgattcttatgctttttaataaggtgcttctcaaaatattaaaagttctgatttaaagtattcatacgtattcaggcaaagggaaaatatgattaatatmatgttagctgtataaatggaattttgcattatcaatgcaattatatgraacttcagtgctctatatttaatacatattagacttcattacagcattcatttatgcctacagatcatgcattaatgtaaaagttactccttaattcccagtacttgcttaatagtatggtttttcctcaacaaatttggattggattcatccattcctttattcaacattaaaaagtccttaccatttgtcagacactaggaatgaataactgtacatggtactttgcacatcatttatcaataaaattttattaactttaatgacagttcaagtagtttggtgttttttgtttttttttcatttaatgtttgcctaaaggactaaagtcattatgtagacttaggtttgatatagaacatttctttgcagccatgtcgacattcatgggytgaatatatataaggagtcagatatatatacaaataatcatagctttctgatgagccctttrtttcagacatgaactggtgccatgagaccacagttgtagaagggcttaattttgggtagaaaaactgtagcgcctactcttaaggaagtggttactataatcatttcttagctgtctttcctgtccccctgggcaatttgtgcaatgcatagctgtgacattaaacttggaccaacataacttctgcttctacatttataataattccttaaacattatcaggtcaaaaagcaagtattttataaagatttttacttagaaaacataaaaacaaaggaatattctcctttaatacatgggaacgtagccttgtatttgttactttaaaaaaaatgctgtagttttcaattttctcaccttggtataaggttcctcatcagccccatctcttactatttctagttttttcatgtagacttttttccctcacaagtgacmaatcttactttttaacctcctgctaaaagccttaatcattctttgttcacattcaataatgttttaaggtgtacgtcaacctagaattatttttcagtcagtaatagcacaaagtgaggtattttctctctgagtattcatggcagcttaaaaaattgaaatttaacctaataaacattttattacattgtatgatgaaggtaatgcattaggcaatgtatcatacttacttattatacatgataactayaataatcatagttatcaaatagaaaaatattttatcctaaatttaggatatgaccatcctgttttagattgtaaattctctgaaagcagttatcatcttckattttatgtaattatttaaaattcttattgtatcaccaaactgggtccccccttagttaataaaactaaagttaaaatagtattacaataaaacccttagacatagtgattttcctctacttttgtaactggtgcatttaaaaacaattcaataagtggctcccattctccctatatgtcaataaaacacacaagagttattaaatcagatgacaactgtactcagaatgtatatggcctgtgatgttgtctacccatacagtatgagttaaattagaatgctagattttattcatgtttttgttgttcaaaagcaaattatgtatcatttcctagttgtattatttcaatatcattagttttgaatatcattcttagtttaatcaattactgaacaaatatttgactatctaaattatgccaaatttgctgtatttcctttcattttatttgatcatttttgaagtgtttatgttaaggtaatgtatgtgtctaatgaactcattcattgatctgttaattccaccaaatatttattgagcacctagtatttttaataaatatagtttttctaattaaacatttttgagatattaggataattgtagattcacatgcagctgtaagaaataatacagtgagatctggtatgctcattcatcagttttccccagtggtagcttcttgcaaaggtatagaacaatcttttaaccaagatactcacattgatatactcaaggtgcaaaacacgttcattgccacaagattccctcatgttgcctttagagtaacgcctacttattttcatcttgcttgcttctaataatgccttaaccgctggcaaccacgaatgagatctccattcctataatttcgtcatttcaaaaatattatataaatggaatcatgcagtttgtgacctttctggattggcattttcagttagcaaaattttctcgagatttatccaagaaaacctccaatgttgttatatccagcattcttgttgcatatatcaacagcgcattcaacagcactgaataggattccaaggcaggggtataccacagtttaaccattcacccattgaaaaacatccaggttgcttccagcttatggctattatgaataaagttactgtatacatgtgtgtactcattttttatcaacataagttttcataactatgagataaatgctcaaacactacaattactgaaccatacagtaattccctgtttaattttttaagaaactgctaaactgttttccaaagtagctgtaacattttacattctgactagtgatgtttgagagacctgcctctatacatcctcaccagcatttggtgttgtcactatgttttattttagctattataatcagtgtgtagtgacatctcattgtggttttattatttttcaaatggtttatgatgctggataccaaacatgtgcttatttgcctcctgcatatcctctttggtgaggtatctgttcatatcttttaaccatttcttgattgcattgtttatttactgtggagttttgagggttctttatatattttagattcaacttctttgccggatacatggttgacaatttttttctcctagtctgatgcttgttctttcatcctcttcacattggcttttcacagagcaattttttaaaaattttgatgaagctagtttatcattttttcccttgtataggtctctcttttggtatcaagtttaagaaatttttgactctcttatggtttttactaaatgttttatagtttttattttttatatttaagcccatgatccattttgagttaagttctgtgcaatatataagacttagctcaaggttctttatcgttctctttttacccatgggtatccaattctttaagcatcatttgttgaaacatccgcccaccttccattgaatttctgttgcccttttatcaaaaattagtctggcccatttgtgtaggtctatacattagtttcctattattcccatatccaatttaccacaagcttagtggcttaaacagcacaaattcacaacagttctatgtgttacaaaaatgaaatgggttttactgggactaaaatcaaagtgtaaacagggctgcatttcttctggaggctgtaagggagaagccatttccttgccttttctcacttctaaaagctgcctatattccttggctcattgctccttcctctatcctcaaagcagcagtatagcatcttcaaatctttctcttattttgacactcatgcctgctttttagaaagatgctcgtggattaggttgtgaacatctatggatggttgctcttctgccttccacgttctgccctctggtgcccaaagattcgcactgcaatgatcagaactgcttatgttctcataattgtatgacagtgtgttgaattaaagagggagagtaaatttaggacataatcctgaggaacaccagcctttataggacaaacagaggaagagaatttatagtatgtcgggagtggcgggaagaaacaaaacaatataaagcaagagtttcacagtggtagattaataaagggaaaagttcaggggcaggagataggatcagcagtgtcaatatgtatagcaagtatctacttaagggagagcaattactaacttaagctcacaccacaagcttaacctcagcaagttcagttgcataaaagtatagtgttagagggacagagccagactgaacaccgactagaaattgaaatgcagacacaaaatgtgtggtctgttaagagggtaattatttgatgataattaactttaaattttgaaacagttgttttatcactttgtaaaaatgaagcgaaacactctttttactaatttttttcatataaacaaataaatataacaagtgtatctctatcatgtacaagttataggaagacatgccgtgcaataacattactgtgggcattaatcaagaggtggcagttattacagaaaaatagttgcaaagatcctaaaatataatgattaaactgtctgcacaaaagcaaacaccacacacacacacacaaacacactctacaccactgtcatttggacattctgtataaaagctgtgatttcagtaaaagtttaaacagtgataactttgctatatgggtggactaatatgtgcttatcaaatagtttgcactgatataatgcataacttcagattgtgatttaaaaataagaaaaataatgctttactcagaagcttatttttctctcttgtgtctagctacttaaagagtttaaagatgaagactggaacatgggcgatatagtatacacgctcacaaacaggcgctaccttgaaaagtgcattgcttatgcagagagccatgatcaggtaaatgaatatgtgcataaattcatttatttctctctctctctcttcctccttccctctccttaataacatatttaaatataaacatatcgaaatataaayctctgtagttactataatgtgtgtatgtgtgtgtgtgtattaatatatatctttacaggaaaactacgtatattggaaaaaatgttaaatttgtagatggagaaactccagtttcaaaatgcagtagtatgtttgtcctgccaaactataattaatagattatacattgcagttgcaagtattatatgttttcccttgtcataatgaagaaaattggtgctggaccaggtttattttagtttccgtcttaggctgccttctagaggtattcttttatgcttttgacaagcattcttcagtttttcccctcagtcactgaaatctcctgctaattgacctccctgacccctgttccatccagccttagtctgtcttctcgaatacagcctaagttattttctaaagaggaaagctcgtcttgtcaacccagatatactggtcgaagcctgtaattcaaagccactcctattttggctcaagccggtttccagcattattctctgcccaactctccaagcctcctgttcttcaatactttgaaatccctacccattccaaataggtcagctttttccaatcttgtgcttttccccacgcatctgcatctgggaagttcctactcagacctaattgtctggctctgacacattctatataaagccttccttgggtcatgtagggaaaaattagttgtcccatcctccaagtttccattatgttttaggaacagaatttttttttcattgtctttctatttccagcctttagcactgtgactgatcctagtaatcacttaataaatatttttaaaatggagaaaaaaggtcacttatttaaggtcatattaatcctcatacacatcaacataaaatttactttttgtagattaaaatgtagacaataaaatgtttgaagttacttaaagtatctttattaaaaaattgaaactaaataagtttctctatcatttttgcagaaattggccatttaacgcaaacatgattttttcaggtgtctcctctaattgttaagaaaatgtaagtaaagcaggggttgggtaaycaaggcccatgggccaaatcctacctgctgcctgtttttgtaaataaggttacttggaacacagccatgctgatttgtttacgtattctcctttgtgccaaaatgatgcatttgagtagctgagacagagaaagtggcccacccttagagaaacttgatgacctctgaagtaaacgcatgttaaattttgcatcttccaaattggggctgtgctttcttatcaacttcaatttacattatccttgtctgtagagcagataagataaatacttatctaaaaaagaagaacccaatctagaaaagaataatatttgtttaataggtgagtggtgggggtggggagggggaaactcttaccaaatacataacaatttggaaattaaaatatatgcataaattatagctttctattgcaaactccttgaagttgcagcacatagtgaattcccagcatatgtttattttatatgaatgaaagagtaaacaaataagtggcatgaacaaatggaagatgaaaaagatagatttcttacgtaaatttctacctaatctgtaaagaaaaagatttaccaagaattatttcatactttaaaaattcaggcaatcctatcttatatattcaggaattctcaggatagcagaaataatgcaagttgcctagttctttctaaaagcaaatgtactttgattcttaagcctgataaaaaatataaatgtatatgaatacataaaaatgaataaataaacatataatttatagtaaaaatgtggatgttattttaaactttttagataaatccttaacaattaaatttgtaaacttaacttaatttcaccagtatctcaacaggattttataagagggcaacttggtatgagaataagctttatctatgaacctgatccaaagttattaaaataattttataatagaatcagagattgtagaaataaataattatagctaaaaacataattaaagaattcaaaacaagtagagaaggtgagttgtttaagaagtartgatataaatcctataacaatttttaaagaaagatcattttaattaaagtaggttaaagatagaaaagattgtaaacaaatttcttttctagaaaatgaaaagaattgtaatagggtactgagattatggattaatttctattttacattttactctatgttattgttttgtccatgatgaacactgcattagctgttttgaactgtaaataattcagatttttaggaggtctctctgctgttactcagggcatttctgagttacctgcctcagttaataattattatattttcaggtaaaacaaactaaatttagattaaatggcaaatacaatgagaaagcaaatttacacttaaataaatgttctcaacttattttctctgctgagggcaggaaggaactattgtgatatatttatacacatattatattactcatatatatgagcaaaataatatatatatattatatatcaatgatttttcagaaacttctttcaaagcaaataaaatcattatatacaatctattttaaaaatctatttaatattctcaacattataataaatgtttcagaaaatgtgaggtgtcagctcacatataacagatattcaggtaccttatcatgaatctttcaccaacctattttaaaaataaaaatcagtccagtcctgaaaacaaatgtgttgaagtctaacatattttaccagcttgccttgagcctagaaaatcaccagtggaaaatacctgaaattaatattaatctacacacctcttctacgatgtttcctaacatttgtaaccatgcattgttctattgtaaatcacaactacttagcacttttttttttcatttatctccattacttttatttctgtaggcattggttggggataagtcgctggcattttggttgatggatgccgaaatgtatacaaacatgagtgtcctgrctccttttactccagttattgatyrtggaatacagcttcataaaatgattyractcattacgcatgggcttggtggagaaggctatctcaatttcatgggtaagtgtgagttaaacacatatgcaatttgtgtttaaaatgttaacttataatgacataaatcatgtagaatattttgatttggcttttcagatttagaatataaaattacaactatttatttcatatactgtcgtgtaaattgcaagaataaaattaaatcactrtaaggttattatattaatatatgatacaaaagtatagtctaaaagctgatatttaattgaatattgctgtcaagcgggcttacctgtttttaacatccggaattatggttctgaatttaatcattctgagttaattttattgttatagtatttgcacattaaatctaagaaagatataattatcatattataacatagcaagctagtattattggtcttctttgagataattttataccagtatacttgtgttataaatgtgtgaacttaggttcagagatattgtgttggacaaaaagaaatttattttttaaaatagaaaaatatgaatactgaaaggtcatttttgtctgaaagctcttgaaataaaatataaaaattgacttctagttggtgaacagcagacattgaaacattcgagttttaggaaatttttacagcttttagactagagaaagacacaaagactggggaatatatacaaaaggctgttttatttttctacaataaaagactcagggtgggtggtgcctcacacctttaatctgattcctttgggaggctgagggaggaggatggcttgaggcgaagagttagagaccaacctggacaatatggaaaagccccatctctaccaaaagaagaaaaaaaaaatgctgggtgtggtggtgcgtgcctgtaccctagctaatcaggaggctgaggcagagggactgtttgagcccaggagtctgaggttgtagtaaactataatcatgcactccagctagggtgacaaagcgagaccctatctctaatttttaaaaagccctggatctttgaattattcacttctacttggaaatttttgtaagaaatctcagattgaacttttaaaagcctttattttttactaactggaggttaggaagccaaccccgagaaagcatacacagatttcacgtatactacctgtacctttgggtgtatcctctattctcagggtcactgaaatttgttgacatccctagccttccaggaagtgaccttcctgagttgtgagactgtatcgcatcagccaggtatcaggtcaagttccctggatggactttgcaatgattggttccataaataaagtcagccttagttccttaaaagcaatggttctacctgactcaggatgcatcattctccaatatgggcactccgtaaggccttagttatacagccaatttatgtaactatatcctgatgaataagtaaactgtatgaacctatgcaaataaccatgtcaccatgtaaagtaaggaaactgaggacctagtgagatattttaaatgctttatttcatgtacaaaagtataaaattactatcatctacagaaggaaatccttatgtatctgtagatacataattacataaaatagaagatgataactgctttcagagaatttacaatctaaaacaggatggtcatatcctaaatttaggataaaatatttttctatttgataactatgattattatagttatcatgtataataagtaagtatgatacattgcctaatgcattaccttcatcatacaatgtaataaaatgtttattaggttaaatttcaattttttaagctgccatgaatactcagagagaaaatacctcactttgtgctattactgactgaaaaataattctaggttgacgtacaccttaaaacattattgaatgtgaacaaagaatgattaaggcttttagcaggaggttaaaaagtaagatttgtcacttgtgaggaaaaaaagtctacatgaaaaaactagaaatagtaagagatggggctgatgaggaaccttataccaaggtgagaaaattgaaaactacagcattttttttaaagtaacaaatacaaggctaccttcccatgtattaaagaatattcctttgtttgtatgttttctgagtaaaactacagatagtaatactgttttagcattagttcattagctgcaataaccagttttagttataagcaaggtgatattttctaatggcatatagaaattaatatttaaaaagagcaatttaagaaattttttcaaaactaagaaacaacttgattgtttacttatcttttaggcatttctaaacttgttaattttctggaatttyattttttattttcctccaggagagaaacagtgagtcaaaagaaataaaacaactatacatttgtatagcacatatttttataaaaacatgtttacgtaaatttatttgtcaggcattcagatatatgttctgtttatcaaaagtcattaagattaatgtagattttctcagaataccagtttggctgatttgttttgttttgtttttgtcttatgtattctaattttgaatttcaaaaaaattctttcactctggttatagctgtgaaatatttactatgcttttttgatttgctaggttattgtgaatggttttatgaataaatagatttgtatttttttattctatcatatatgaaataattgaatatagaagggagatcagcaataactaaattatttttgtcagtaacatcgacatagcattctctacttttttttttttttttgagatggagtctcgccctgtcgcccaggctggagtgccgtgatgcaatctctgctcactgcaagctctgcttcccgggttcacgccattctcctgcctcagcctcccaagtaactgggactacaggtgcccgccaccacgcccagctaattttttgtattttttagtagagacagtgtttcaccgtgttagacaggatgatctcgatctcctgacctcgtgattcgcctgcctcggcctcccaaagtgctgggattacaggcgtgagccactgcccccggcctcattctatactttctaaaacacttcatatctattatctaaatgaacattccatttcctttttattttttataccagatatttgttcaaaagaaacctggggccaaaagttataagaataataaggcatgctacgtagacattctaagtccattttgctaaaacttcgactcagagacatatagggacatgcctcagtttgcacaaccagaaaatttcggcagctggtcagttgcctttttcttctgatttccaatttgagaaaaattgtaatgaaaattactctgagatcagtatctagattagttagccacaaatacatggtttatgaatactttttagagaaaaggtacagcatagtggttaagaatactgttgggttggaatctgtgcctttccctttttggctgtgtgatctgggtaagatgcatcaactatgccttcatcggctcagtgataaagtgggtgcctgcttcgtcagattgttttgagggtgaaatgacttaatactgttatacttatataaaacacaragtatttgcaggcatatagcttatagttaactattatttaaattgacggttactatattttaatattatcagttactccattaactatatggtacctgaatgctgatgtcctaattccatttaattgtgttttttagaatgttgtctgatagtacattgtttaaaataaaagattatttcatttctactttaaaatatcagtaaatgtagtgatttgttaaaaatcaatgttcttttcctaatttatgttatgtgataaattaagccatttctgcattaagtctcaccaatttaccttctgagttttttagtcataatgatgtctactgaacgatgctgctgaaacagccttagctttcatgtgtgaggaagtctgagggttgcctcaatttgtttttatttttgggataagccaatatcatattgctcagttaacatttattatgaattgactgtttcctttgtgtgtatataattatgtgtgtatatatgcatcagatagagcatcagatgaaatttactgtttttatggtacctgtgcacagaatttctacacacacacacacacacacacacacacasagagagagagagagagagagaaggcaaattgacttagagcaaattcagtctgaaaagttagtgtatttgaggtgtatattaatttaaactataaatttaatatattcataatgcattctaaaatgttgtaagatttctttatgcttaagacatttatatgtatctatgatataccaggtattactaagtggtatgtattcagagatgaaaaatagttcttgccctcaaggccttaaaacccaaaagggaatacaggcaagtgatagacaaatacctttatagtaatgcatgcactaggttcagtgatacagataagcagaaaatgctgtgtaaatatttaggaaacttgttttggagattgttggtaaaaatatgatatgctttagccaaaccagcttggaataggaagccacaggaaagttatgtatgagatcagtaatagtctaagtaagagtaggcttgaagcaattgactgataatttgagattacagccagttaagattattaaactttgaataaatgaaaaaaactggggcctaaagaaaacaatttacatgccattctgattggcaagtttaatgaaaagatgagtttcaatcactttaaattactttaaaatattgttaactcttcagttagaactagtattaatggttatgtgacattatggtttatttttttttaaataatcattggctaagtatgcttcgtgttcaaaaataaatataaaataaaaaacatcaactttatgcataggatgacctcagtgaatgtattttactcagctttctggtgcttatttggttatcacggaaatgctatcctttcctaattcagtcagctgaggcagagggagtagagtcatatggccttatcatgtgacccaggaatgttgctatgaacatgctggtttaggcaggcaaattgactactatgtccagtgatcacattagggaaaaaaacaccaaccctgatactgcaattttaattccatataatatgaaaataagggcattaaaggattttcttattaaacgctacatagaattataaaaaacaagagaagaaaccaaatatttaattcattttaaatatataaacatgtacagatgttttaaaatatcaagtaaagcataaattaaaatataagaattaagaacatatctttctgatttaaatattgacaggcaaggtagaatgtaattttaagaatctgctaactaaacaaaatttaaaaattaatcataaatttgaaaatgaaataatgtctaatgactttttaaatgtgaacttaaaaaataacctgcttaaaaatcttgccatcattgagacacaaatggtattttgtgaaacattttctggcttctcagaaagatctttgtaactttatactacattgggcaatagtaaggagaaagttatactggacagctaaatacacatattttattcattcttttattagtccattttcatactgctgtaaagaactgcctgagactgggtaatttataaaggaaagaggtttaattgagttacagttaagcatagctggggaggcctcaggaaacttacagtcaaggcagaaggtgaaggggaagcaaggcaccttcacaaggctgcaggaaggagaaatgccaagcaaaggtggaagagccccttgtaaaaccagcagatcttgtgagaactcactatcacaagaacagcatgggggaaactgcccccatgattctgttatctccacctggtctctcccttgacatgtggggattatgggaattacaattcaagatgagatttgggtggggacacaaagcctaaccatgtcaattctcaagtaatcaagtctctaactttaagaatttttttaaaaataacctttagatttctttatgggtactggaatcttttttatcaatagcttactgccagttttgttttaaaaaaagttgttttgttttccaccctggtttgacttcttctttagtttcataacgtataggtaaagattcaaatgtagagtgacctgaatcacttttagtactgtcatgttaatattccacttgttcagaatactttgaactaaagtaaaaattattcttggaacagaagctttactttcatcagttgtcattttcttcttcctcctggggattgtagtgttatagaagagcactttttaaatgagtatagcttcactctatttgaaatttaatgctttttatataactctccgggtatacctcgaaacataaatgattcacatttctcatttaaaaaaatactgaactagcagacttaaatcaagaaaaccagcaacatttcacttctgtaatgtagctcagtgctccatataactgaaaacctgtgttgtcattataaaacatattccccatgacatsagatgttaacacataagttgaaatatcagaagaaatctggaatcaactaaacccattggtttatttgtttgctcattcattccttaattcattcaaatcaaactcattatttccatgtctaatgtcttccctcttcaacggagaaaagtaatmaaaggaggaaataagtaaaaaggtatatgaggagctgtgtgtgcagataacgctatgggacatgatgtaggaagtcagactcctggaattctgtctcttttcctatccttccaccttgaatttacctcctttttccctccattttatttttgtttgtttcagagtaatatgttgcttttcctgttaaagaagactttagatcctgagtgtatactgtcttgactttaaaagcctaattcctactattaaaagcaatcatgttatcattatcttttatatagggcacttggtagaaaataaacatggagttatttttctacttgccagcatgtatggggacacatttacagatataattatgtttatggttttttaggctctttagaaacccataccttcttttattctaactgaattaagagaattaagaactagtggtgttccaattcaggcttttaaagacatactgtatacacatgatcaatgaacttatagtgcaatgcccacccctttatgaaggcctataacatcctttatgatccaactactgcctacctttccacccagatatctctgcttcctacttcttgagtactaagttacaattacaccagtctccaatttcatttcctgatacacaggaagtaaaaagtaggcaggcgttaaattataaagatcatgcactttttgaaaatacctgtggtaactttatgcaactttactttgtgtgaaatccatcaaccttcatcttctccctcttaagatttgggaatatctttcatgcttggagattcataacatcttgctcacacttatgagaaacatctgtaattttagtacaacaatcatatcctgagagccaatagatcagttatgagttctgaatctgtgttggcaatcaggatactttgaacaaatggtacaaattcttaatcccatagatttctgtaaaatatgtcaactgcatgcctttaagaatttttttttctaatttaacattctgtttcttaggttaattagaagttatcactgtaaaagaaacacctagtgaccgtatattttagtctgaaaattaatattgtctttggctttataaaaataagtaagcaggccagtcatggtggctcacacctgtaatcccagcactttgggaggctgaggtgggtggattacctgaggtcaggagtttgagaccagcctggcaagttaaatcctatctcttctaaaaatacagaaaattagccaggtgtagtggcaggcacctgtaatcccagctactcgggaggctgaggcagagaatctcttgaacctgggaggtggaggttgcagtgagctaagatcacaccattacactccggcctgggcaacaagagcaaaatcttgaaattaaaaaaataaaataaaataagtaagcaaagaaaagtggcaattattttctttattagaaatcaatgtttgaaacagtttttcagttaagtgtttactaatgtgttgtatttgtgtgatagatactccgtctgctctctcatagctgtggtcgtgactgctagttttctccattaacacttttcctccaaattttaactgggtacatggatggccagaataacaagcacattccccaggttctttggaagcctgctgaggtcatgtgaccagcagttatggccagaaggatgttaatggtagtgctgtataagcaactcacaggtcaagctcttaaatggcaagggcatgaacatctctgaccccttgccacatcttctactcactggtggaatgccatatcatgtaaatggcagaacaacaaggtcaaaaaatattagttggcctttacatattgctatgtattactgctataagagaaatctttttaaatggcatatttcacagtttacatgtcctgtaacattttttatcttagcattgaaaccaaagtaaaatttaattcctaatgtcctacatttaaattagtttttttaattcccctattgtttacccttattagtgctaatgtcagtaataactaaaaacattaaaaaattagttttcaaatgtaatttggacatttgggaaaaattaaatttttatcatataaatataaatgttccataaaacagttgtgtcactagtgaattgaagtaagatgttaagtatagctcctttctaatattggtcacatgtaatttggtattttttttagatctttaaaatgtcaattcatattttgggggggtggtagctggaatgtttatggcattttaatagtcaatagtttctcctagatagctcacaatctgtgtatacatgttatctctccatttagctcacaatctstgtataaatgttatctctccatttatatatgtatatatatacacacacatacatatatatgtcttcacatatactcacatgcacatatatatatatacacacacacacgttcgtgtctaacacagatacagacacacaatattttttaagtctttttcctcccttaagtcaaccttttaagaacaatccttaamgcatttgggaacttttggaatgcttgctttcattcactcattcattaactcaggtagttactaagtacacattccgtactaggaattgttttagttactctactaaatgcttgacatgcaaagtggtcaggataaatatagcctctttcctcaggaagcttaatttctgttaagggcaacagagagaaatggcaaaacaaaacaaaacaaataaaaaacctgcaaatgataagtgacacaaagaaaacaaaaacattgttaaaattgagaacacaattttgggaggctgaggccggtggatcacttgatgtcagaagttggtgaccagcctggccagcgtgatgaaaccccgtctctactaaaaatacaaaaattagctgtgcatggtggcacgcacctgtagtctcagctacttgggaggctgaggcagtagaatcacttgaacccgggaggcagaggttgcagtgagaccagatcgtgccactgcactccagcctgggtgccagagcgagactccatctcaaaaaaaaaaattgagaatccaaagatggctgtaagctagatctttaaatacttgaaatatacttcgtaaagatcacagaaaaacactctctaaagagaggttacagaatgttcaaaagcccaggggtgggaaaatgctgggggaattcaaggaaattaaaggagactagtgtcactgtaacttagtactcaagaaataggaaaggcaggcaggagttagatcataaaggtcattataggtcttggtaaagaagtggacattgcattataacttcagatgcattttaaagagagtcatatgaaggtgcaatctgtttgacaaagataacctttgttgctttttaaggattgactagggcaagagtaaatgcagggatactactcaggaggttgttgaagtagtcaaaagagtgacaatgatagcagtggagatagaaagaggcaaaaagagtcaagatataattttggaggtagatttaatcaagaagtcttagtaatagtctttggccataagacaaagagaggaatcaaagaatgacttcaggtttttggcttaagcagccattacctgttggtaccactttgtatgagacaaataaggctagagtcaggttagaagtgaaggtgaggagtttagttttaggtatattatcttcatgtttctttgaaagactcaaatgaaatggcaaacagtttgaactcagagaactggataaataaaattggtatttctcaacatatgaattttgctagagccatgatactaatgaggtcagctcctgcaattgagaaccatgaaccaggaagaaaagaaagtccaggatcccagaggaacactgatatctcaacaaagagaaggcataaaagcagactgagaaggaatgatagggaaaaaagaagacatatcctgagatttcarcaccttgaaaaccaaaatatagtatttgaaaaaagaggagatggccatccatgttgaataatgttaagcagctgaatgaaatgaggacaaataagttgccagtggtgaactagacgagactgattctgaggggatgatgagcgtgagagccagaatggagtgggtttaaaagtgaaagtcaagtaatgcttttgcagacagctcttttgaggtgtttgtctaataaaggcagcagataaataagatagcagttcgagtgggatggggatcgagagaggtttgttttcttatgaaatataagaacatgtttgtgttcagaaaaggcctattcaaaggggatgattccgtggtgagagcaagatcaacatagaagggaaaggggctgcctaaaggagaactgtagttccaaagcacaagtggaaaggtaaatgtttatacagaagtcctccttccccccagaaaaaagacaaaaatgaatacaggtgaaggttggttgtaagtggggttttgtgaagatgaaaaaattcatgattgataacttttatattctcagtgagattatcatttgagagcaaaaggaggaaggaataagagatgtttgaaaaaatagaaggtatgagatagacatctctaggagtgaaaataccagagaactatagtagggtgtccaggtaatattgcatgttcgttagatatttgtaatcaggagtacaaattgatccagcctcttggttgtgtgccttttttcctagagggctagtgttgatcaaggattgtagttttgtcaggcacctgtcaaaaaaaggaaggattttgaaagtactagcaaataactaacatattaaagaaccaatagccaactggttctcaaaatggtctgtacattggaatcacctggggactttcaaaaccactgatgtctatgacaaatacctagaaattgtgatttaattggtcttggctagggctcgggcattgaaaaagaatcttaaaatgattcccaggtgattcttaaggctaggaagtgaagagagaattttaagaggtcgtaaaagatataggaaagttctcctgttttagaacagaagttgtagtgagcatagcaagaggattttggaggaagagaagaaaagttcagattgtggtatgtggtgagttcaactatcagtgcctggccaggaggctgaacttggatttcccgtaacaaacaaagcaaacccgaatggggctgctgctgggtattattgagaagctttctaaaatatattttcatcagtaaataaagtttaaatcagaagcctttctgcctttcttatattgtttgtatataaatagatttgtatacaaatatatacaaaatgtatgtaaatagatttatatacaaacaaaaatcatggcaatagagaacaaagtattttttgtttataatgtaggtcatctgatatgtgtacatatgtttttcctgctttcttgtttagcactcttattatcatgatgttattctggtttctgtaatgagtgatacctgtggagaaaaaggcataattacaaactggcaattttctctctcagcagtattatgaaatttccattactaaatttaaaggattttctcaatataattatattgtattttgacatttgataattttgtaggacattctttaatgaatatgttacattctccccaaagccacaggggaagttggatggattttgtcctaagtgtcagtctgcatttgttgatcgctacattagacttcagtataaaatgtgtgatcttacttcaaatcttccatctgtggttgtttagtgtcaaacttgtaaattcttctatttttctgatagataggaatacaataaagatttaaatgtcttcctgctaagcgctggaattaaggcagttatagaaagacaaaatacaytctcctgaacagtgggaatgctaatttttggcattttcttttagcttgttgaggcaagtttgctgaatgtaacatgactcatagaagtctataaaactgagctgtgaaaaactgcaaaattctcaatatgagcagttgtaaatggcttgaagttctgttaaaatgctcagagatacaaatagcgtatattccaaatggcacagacttaaaagcaatggccctgatttgattcacagcacactgttaaccagggttagctggcatttaatgagaacctaccatgagcatgacattgcactaggagttaaggaagtgctgctacaattacctggggagctttaacatattgaagcccaagagcctgaccccaaccatttgagacagaatcgctgagtgtaaggctctggcagtagttgttttgaaaaatctcaccaaataattttaatttgtgaaagtataacatagagatccactgatggaagaacatgcaaaaatgaagattgagagagacagattgacctggactgtgccggagtcactggaagccaggcgagagaatgtcctcagccctctttcccaggtgacttaaatgcccactactggaaaaactcctgccaggttagctttcataagaacaatttcacctcagatccttcctgatgaccataacctttgagaagagtcactttagagaacattgcttatgtaacttacccacatttttttctacccacccacatttaccaaactgaatacagaaaatcttttacaaatataaaaagattatactaatattctggagaggaaaaaaagaagcaactgaacctaactatctctaattctttcagtcttggtcttaggataggatgccccggaaatactgctacatttcttcctttgggatatttgtgattgtcagtggccgtggtgttgactccttttgaatttctcctcagttgggctgtatccagctgaggcccttttaaagatggagtgagaaccataggaatacacccactgcggtgcccaggtgtgaccaggtgcagatattctctgtttttcatccatctaagctaggtccacctctgttctcatgcctctgaggcaatgtccatgtgaggatgggcattgtatcctcacatggagaaatggacagaggtgcaggaaagtgttcctttaaatgttgagcccttttataaaggtgttagttccattcgtgatgtaagagcccttatgacttaatcacctcccagaggccacatctcttaatgctgttccattggtgattaaatttctacaggaattttagaggggatattgtcatttaaaccataacaatccttccttccttcctccgttccttccttccttccttcgtcccttccttcctccctccctcactccctccctccctccctttctccgtctctccctccctgaatgtattcattatccacacractctggcttagaaggttacttatatatctaaacctctccagctccattgttaggttatagacaattgagtttgcagaatggaggtatggtttactttaacattatatagaaatatataaacttttatcaagccttatttattacttaattacctagcattttataagcacttcaaagtttcattttctaaccgtgagccccagtgactcacaaaagattcccttaaatacagggaactggataggtcacctttaagggctggtgcagggggaatagattgctactctaggaataaagataaattaatatacaatgggcattaattctagccttgagtctgtaatttggtgttacatcttcaattaagccttccctcgatttgatcccaaagacccacctgagtgacagcctcactttattgttggacatgcaaacaaatgaatagccctaccctttcctgacatcactctacagagtaccatggtatgggttttcttcacagtatttctgccgtgttgttaattcttaaatcatctctcaccttcactaattctcgcctttctaattttgctatattagtaatgcttgttatttggctcacagccacttagcacactttctgtaagtttctagaggttaccagaaaacctacagatcttctttccaaaaagaattgatcagaggcttcattttagctcaaagactgaataccggactctgccagtgttattcatgcaggctggaaggatccataggctgaaaaatgtgagatgtattgtcaaactggtgagctatayggctgtcatctcatagaacgtagtgatgagtgctctaaacacagatatcttgctctggcaacctttctcctgaacaactcgacaataggagactaggagtttaaaagatgaatttctctgcctctaaaattttagattattacctgagtccttacttctccatcccaacttggtccccctcccattaaaaaaaaaaaagatgaaagtgacctatacataccgtctcaaaatagtaaagagaatctctcagttacttagaaaatacagttagttttcatttttccttctcactaagagagacataggtttctctttggcgatatattttctttgagaggttgaggggatacagattatttagatgacttgcctcaacttgacagtcttttagcaccctactactgtaaaaatggctataatttcttgaaaatttactcagagcaaggcagtgcactgagtgctttacatataatatctcatttaaaactttgtcatactcctgagaggtagatatgattcccttctcttcacacctaggggaaatgtaaggttaagtggctttcagatttataaaggagccagaatttgaacccagctggtctgtctccaaaatgtaggctctgcatcactaccctatataagacagtagtattattttgcccaaaaatgaatgctaatgtwggtagtggtgttggtgcagctctaactacagtcattcatccagaggagatgcaacaaagaggaaaacaacagatcaaattttgtattgtactgtggtctatcaaacaaatcaagggagaaagtaatttgtttccaaattatgaaccaatgttacaaattacttaatggtcctctttgtttacttgtgatagttatttcttcattctacactaatttggcacctactgctgagccaggcactatcctaggaactgggtaacaaaagagaacacttagtcttaactcaaggagctcactatccagagaggaaacaaagcaagacagatgcgagtgtgttcggtaataaatttcaccttcaagatctgcataaagcaccgtgagtacttcaagaaagatcacgaaaccaatatttaggcaaggaagttgcaggccatgaagaaaggcctgctttggaagaagagattaagtttaaagtatccgtttcacctccatgctgatcctctgtgtagtcccatcactggaatggtggctacacaaagctaagaaggtgaaacagaatgagggccttactaatttagatcatgaatgatgagagagaaggctgaacctagaagcagaggccaggtcgtagagggcttttgaagggttttgcaggagattggcatggtcagatccagtttagatatgttacttgattgataatgtaaaagatggatttgaaggggctgtyacctcaaactaaatatagaaatgaccttttgccaccagaattctttcatattagtttaaagttgtaggtctaaattctttccacacttgtcatgtcagtcagtaaattttatataccgccactctggagcagtttgaaatcatccacttcatttttttaaaaaaataaggtcttgctaaagattacgagggaagtaaagtttctatccctctgttgactcaaataaaagagatattcattaactctgcctaacttatcatgtacaaaatgaaatactgttccattgtttcaggtaaattatttttactgcatattcatattttaggtaatcaaacactggaaaattgttttagtccatgagacaagagttgtgtttctttgactgtacaagtttgaatcaacttctgcattatatttcacaactcaaaactgacacagctacttgatttaagcaatttaaaaacataaggtagtataggtgtaacactttatacgttatcatctgtaattttttttaatttggtgtttgtaaactgagtaatgataggtgcagttgaaaaatgtgtttattttttaaggaattttgtaatacagcaaaaattgccacctgattcatcttttgtaaaagaggttttatataactatgtgtcttaaagtaagttgtacccatagaagtataagttataaatgagaaaaaataatactataacttttaaaaccataaacagttctgtagaaatgcttataatacttgtctttcccctaaaaatacacttaggaaatacgtctacaattaacaaaaaaagactatactattaagcttaaaaatataagccttatttcagtttttacgaaggaattttatagcataagagaaacaacccagaaacagcttttcaacttcgtttgcacacaattatctgatagactcttccaagttaaatttaataaagccaaatgtgataggtgcctgagcttcaccaacacacacaaaaccaaaattcagagataccattttgaaatacgcagagatgaccatgtggaggtgaagagatgaaatgacaaagataagtttgaaaacctaggtaattcataccttttcagaactttaatcttttatacatcatgtttttattttatgtgggtcatagataaaattttcatggtatagttgataacaaattgataaatttattttgaaattgttatactgagtcatttttatagtctttccttcccagcatagtaggcagctgtattatcaactttctataaacaagaagacagttagatatcttagattattccaatatgatttttatagtttagtaagaaacattatctgatctatgtgattaaaaatgttattttaaagtgctatgactttctccacatttgaaattttatttacctttttgttataatgtagaaatgctgtgcacttaaaaatttttttttagatcagcttattttatactcacctatagactgtaaaattgtggtacgatgagaacttaattattatgtgttgaacaaataaacattcataagcctggtgcattctgagaaatccatttattgactttttagaggacattttatttattaaagcaagactctcatgaaagctatgtgaacatataaggatctgtctctttgtttctttcttttaattaggatattttaaaatcctttgtgtatggactgtactataaatgaggccaaatagatactagtagaataaatgaaaagttgaacatgttattttgcttgcaacattggaaagctactgttttgttattcattagtcattccaaatatttttggarcagacttttctgatagcttctaaagagagtttgatggtgtactccttttgtattctctttgaagaggtataatcaaacaattacttgattgcttgatacaggcagagcacctcctctacacataaagcagagtgtataaaaccaattccagcaacgtggctatcttcaagtgtatatcatctgtgcattctcggcggggtgatatcaaccccaataggggcaaaaattgatttttctggtagaacaaataaaaccttagatacaatagtgtgtggctctccagagtgccacagcatataaacagatatgcaatagtatttggagcatcaaaacttcatggggtgggtacaatttggaaaaaaaatggctgaagaggcttctgcagggtaagtgagggagtaggtagggaggatacataatgaaaaaagaattgagcaacactgcattattcatattgtcatttctgggccttctacaccagggttgcccactagagtctgattacctcaaaatagtaccttaatgataattgtttcagttttctagtttgatgtgtaaatttttcttttagggcagaagggtaagattttagtcctagcctaggcattcgcattttactaaatgttctactttgtaaaataaaacaaagactttgtccccatattgttccttacattggcattgagaatacttattctcttgaaaatacttctcgagtagctaaaagttaagatatgttttactgttttgaaaatgaaaaaaaattttctatgactgccagcctacttccaacttaattcctttattcttccttgctttttctccttctcttgccagtatatgctgcccccaactaaatgagggcaagaattgcctgggcaaatataacatcaaaggccagacagcttaagataaagagctgatacttttaaattctgatttctttcctacagacacccatcattttttgagtaaaagacaaggacatctgttcattttaatcagttgacttcaaggtcacatgtttaaatataaaaaggtctaatatagaaatattactatatggatataatgaaaattattttttagtgaagaaaataatcattatacacattaacatttaatatattgaaatctgcatgtttaagcatggttttgtttcctaaaatcagtaccttgggtacacacaagacttgtttcctcatgagtcacaaatattttcataactgctatcttgttttgtcttggaaagttcaattgtaagaagctgatataattattaggacttacagttagaaaactgaatttttgaattttgctaattagcagacattttgctattttctgacccttagcaaaaaatattttataacaaccagaatttcctttgcaacttgatgagatagatagatagatagatagatgatatatatttgatacctaagttgtttttgtttttaaattgtaattaaataaaacagtaaatgtcktcttttttagggtggctaaaatatgcaatatcagcagtaagcattggactgaacatggttctttttaaccatgattttaatactcatttgttttaattattttggtaattataataaaagaactaggaaatgaacctgagaaactataaacacacacacacacattgacttaaaatacatactttacaaattgagaaataggttaccaacctgtaaagctcattactattttatcattttttctcttatttgccaaacttcattatatagttacgtgtgctgatcctgcttcctcatacgctacccacctctcaaactcttgtactttccctgatgccgtctcacaattcaggaactttggtttccaagatcatcattgacttgcagacctctgcacccactacctgaactcctttgacctcttggttcagtttgactcctcaggttctccttctctttcttctttgttatgttatgattctcctgtctgcttcacagactccttctcctcagtttcttctataatgtattaatacatctttctcaggtgttctactggttctcttttattgcttccctacctctctcagaaaactcatctacttttatgctttgaccatttctttaatgtaaataactcctatatcattatctcaaaatccaaccttttattctgaattacaaacataaattttgaagctgcctgagatctctacctggttatcttgctggctcctttaagtcactaaatccaaaactgaagtcatcctccctataaatcttgataccctttcttcttctttctttttgtccttctcccttctcctttctttcttcttcttttccttcctccttccctcttcctcttccttctttcttctttatcctcattattctggtaattaaccattgaaatctgggagtcattttagttgttccttttatttgtttatttttaacatccagccatagctaagtcacagtatccttattcttcgtgaccttttccccatatacacttccacataattttatatgtctgttgcatttgtttaggcttttgcagtttatgcagcatttttgcatgcataatgtcactttttacaaacaacgtgcaaggtcggtatcttttttataatttttattttgggacagcaaaaattaatggttaaaagttcagctttggagccagtctgtctacattctgatcctggctgctttgcttcctggctgtatcatttttgacttgttactcaatttttctgtgcctcaacttcatcgtttaagaaaggggattataatggtacctattttactgggcatttgtaagaaaatatttaattatgttaagagtttatgttgatgctttttatttaataaatgttcgataaacaaaaagttacacagcaggaggttacacattgtaagtgacatattacaaattttaagttgtcctaaaatttatgtcctttgtatccatattccatgcttcacccactgtatgacacatcattgtgccttttaaaaaattctataggagaaattctttatttaactggagactggactaatttatattcagagaattattagaaagcgtaaaactgcaatataatttgtaattaaatacatcatttcacagggtttaccttcttgatgtttataccctgtgctcccaccattcctaaaaagtatttctttaatgggtctcaggaagaacattaaagtaagtatgtatatattcctggatagtagtctagaatgtctcccgagttatgaatatttagatattcatgagtcttgacatctgtcacttggagtattaaaagtttctcgttacccccaaatacctgacacatttaatgattctttgtaaagtttcaagaaataaagtttcctttttatacattcatgtgccagtttatgagggactccaataactgttgtgccataattctggattcttattttaatctttttagggtaattaaattctcttggattttttttttactctctaggtgaggaatttcatttatctatgaatagctttgtttatattgtttaaagttgaatatattatgtttatttgacattaagtaaacattaaatatktaagatatttgatctgtgataatagcatattttattttaagtctccttctgcactacccaggtttcttactggaagcttggaaatttacttggaaatttacaagtttaggtacaattacgttaaatagactttactgtatatctacatgtacagaacatctcactgtacaaagtaaggcacacaactgaaawgtccttcctacatagtccagatcaaagctctaaaccagaaggaagaagaggagcaaaaagagactmtttatattggacttagctcctttgaaataattttcacataacaaccctgtttgtgtgtcgttgaagaagacaaggagccataaagggacgttaggaaatgtctattctctagaaagcagtttatccagctaaaaaaattatgcttttctgactgaaggaaagatacttctcagtcagaggaggggatatttaacttggttaataaagaatggacagaatttctgtaggcaaaatcaggctttgcaagtcaaagaactaactggacagaaggcttcgaagcaggaaacctgggtcctgatcagattattacatgtcatctggctctttgaagcarggtctgcatattgggagatgaagtacaaaagatagcaaagaaactttactcagccaggtgtgaatagtagagatgagcacctccagatggcataatttaagtaatgaaactgttagatatgacaaaaattaaatgcagcacccattaagttactaactatattgcttcacgtctgtgttctttcctttgctatactatttctgtcatttagaactttgtctcctgtagatgtacaaagaatgagttagccatatggaagagtttatggtttacctatatggagggtggtagtttgtaggttgtgacaaaagatttgtgtttaagcgccattatcttaaagatactagattgtttgtttatgtatgttcaacctatatatgtttgaattctcccttttattgccttcaaagccatttgatagcccaattcataactttatagtcacatttttcaaaaatcaaaatcagcattacccagagcaaagcgagagagctgaagcaagcaagtacaaacactgagaaccttttcttcttattgtgggaagaagttcacagtgtttcccaccagctgtcatgctgctatggaacttttttctcctttctttggcaccagtggcctgagaggaagcaagagctgatagcagggaagcagacaaggctaactagctgttggcaggaacctggagcaatagaagcatcatccaaaggcaaaccaatacaggctctttgattaagttataagcaggtagttacgtctctctacttggggagttagagctctgatacagaagaaaggctgtgggagatggaaacctagaaaagtagcagccggctgtgccttgaacaagccttggattcttacaaaaacactccaccagcctggaatgataccagtattcaattaaactgatgtcagttatcaaattctgagtatttaaggaaacatgttcttactaatcttttttatttttttcccctgtggctatgtgctttctttttaaatgtctgtgcttagctcttaaagagtaattgactagggaagtttgttaacctctgtcactatgtgtgtttgctgtgaccacaggaactcactctgacttagcggtagcatatcctaatcataggcaaacaaagtagcacagtctgtcttcactactaaacttttgagtctaaacctaaagttgcaatagccacaaagccacatgtgtagaatcaatttcatagttggctaatttattccttgctttcatatcccatttttctgccttattttctactgcttaaaatggtgtggaatctttcagttggtgccttattcacatgcaaaacatttatacatttttacaaggttctccattagcaaattattttctgagttatttttaacttacttgcaaaaaatctgaattcagtttgaattttataaaataacatttttttccccccaccatttcctttgtgtggctaattttctcccaatagagtattttgagtctcctgttccatgcaacatcaaaatggcctcaaaatgactggtgaaagcccattactgttgctatgaaaatttgtattaagaaaataatatctggttcttacaacattgtgtgcaaaagtataacactcattctcgatttagtctcatttgctttgttcattgtcttatcctcgtcttatatttttattatttattttaaatttaaaaatgtgccaaaaaatggcatataggtcaaagtttgaatagcaacatgaacatttgaaattgcatctcctattagtctggcattcagaaaaggaaacctaacctctgataaatagacaactgaagtgctttatctgttctcttctgatttaaatatttctctccctgatggtatagatatgttcctctttatccaccccctttctaccccattgtactttctgtctgttttttttttttcttatggctctcatagaaacccattttgcatctgtaaagaaacatttttagacacttttttatctgtctctatacttcaactgggtattcaaaaaaaaaaaaaagacattttccatgaggaatacatagtctactaatggaagcagacatcattgactttattttttttctttcaacatttatttaataaatctttgagtgtatactgaatgcttgctgtagtagaaataatagatgaaaatacaggatatctgtccccagtctaatagaaagaggcaaaaacaatataaccacacacatacaaaacacagcataatgctatttaaatactttcattagtaaagaaaaaaatatatatccaagtgcaagtggaagcacaggagaacactcaagcctttttgcaggagtttaaaaaaaaaactctgaagaggctaaacagctacaacgtggaatcataacaccaatagtagcagcatatgcaaggtacaaagaaagcagaggtcagtaataaatacacttcattcgtacatttgatagtggaattggaagtacattctttttatagctctttcattaccttccctaatgcctgtacattcataatagatttctagttaatgttgttcaaatcatgtacttagtgccagatacaatgaaaagtacgcagagacatctaagttcgaatactagtcttgatacttcatacctgtataaccttagaaagtcacattactttcctgatctattatctgaaaacagaaataatgttccctcccatattgaagggtttttgtgaagattattttttaaagtaactgttaataattgtagcacaaagcctgtgtatataggaggctctcaataaatgactttgcttttattttaatattgtgattattttacatttcatttatttaaaatcatcttccattttctcaattttaaaaaaaggaattaagagatgtataattacccttcaatacagtaatgctaataagtctttagcatttcaaataaaacttgtttataagtgtgtttatattcattctaccacatttatgtggaatatagaartctgattttgcacttatggacattgctgatgaagattattttttgtttgtttattttgacagccttctttttttttttttttttttttttttatataagatagagccttgctctgtctcccaggctggagtgcagtggcacaatctcagctcactgcaacctccaccttccgggttcaagcaattttcctgcctcagcctcctgagtagctggaattacaggtgcctgccacgcgctcagctaatttttgtatttttagtagagacaggatttcgccatgctggccaggctggtcttgagttcctgacctcaggtaatctacccgccttggcctcccaaagtgcagggattacaggcgtgagccaccacgcccagcctattttgacaaccttcttaacattggacctaagaatttacttcacccactatcctgtctttgccttattgatgagaacttaaccaccccaagcaattgtaatcatgtagataacacaaaggattgatgggtttggccagatcaaccaaagttcaagttgaaaattgttttccaagtgcccatagctcattcagctattacttcaagatgttacacataatttatcagggggaggactgggagagcaggggtagagtgagggtatggacccagcatgcttccctagttctaacattcagcaccacattcctggcccctttcagctcttctagaattgggggtatggatatttgtcaccatggcatgattagatggaacaggagcatttgtctcatatcactgtgaaccctgaatatctaagacaggtctcagttcatttagaaagtttattttgccaaggttgaagatgtgtgcccggacacagcctcaggaggtcctgatgacatgtgtccagcttggtcagagcagttttgttttatacattttagggagacatgagacatcagtcatagtaagatgaacattggttcagtccaaagcagcaggacaacttgaaggacaggtgggacaactggaagtggggagggggcttccaggtcataggtagatgagaggaaaatggttgcattgagtttctgcttagcctctccaagggaggcaatcagatatgcattgacctcagtgagcagaggggtgactttgaatagaagcggttcccagcttgtcttttccctttagcttagtgattctggggccccaggatttgttttcctttcatactctcctactactttctttaacttttacagatcctttaagccttcttttgatccctcttgtccagcaccccccatcatgttaaggaaatggatatttttatggttgtgtaaaatctctcctattaaattgtgagttctatgagaacagggatgatgctgatgtatattaagcaattaagcatgttatctgatgcacagatacacttaagtagttctaaagttgtattcttctgttatagttaaacatatgaccactttaacatggggcttagaatatattctttggcttgtatcttttaagggaggagtgtgcaggagaaagacatgagagaacgtggagaccaaagcattttgttttaaaacagtgaatctgttaccagaaaagggtccctatacagaccccaagagagggttcttggatctaggcaagaaagaattcagagaaagtccatagagtaaagtgaaagcaagtttattaagaaagtagaggaatgaacgaatggctactccatagacagagcagccccaagggctgctggttgttcatttttatggttatttcttgattatttgctaaacaaggggtggattattcatacctcctcttttaagaccacatagagtaacttcctgacgttgccatggcatttgtagactgtcatggtgatggtgggcgtatagcaatgaggatgaccagaggtcactctcattgccatgttggttttggtgggttttagctggcttctttcctgcatcctgttttatcagcaaggtcttcatgacctgtgtcttgtgccaacctctgtctcattctgtgacttagaatgcctagtcatctgggaatgcagcccagtaggtctcagtcttattttacctagtccctattcaaaatggagttgctctgattcaaacacctctgacatatattctccctccattttataagagaactcttaaaggttatagagggatgaagatccatcttctgtaacttcttcaggctgaataagggcaatgatattcctacctaactgttaggtctcttgcattcagggtagagaggagctcagtcagaaagcattggtatggtgatagccattcgtaactattgagtgctgaaaaaaaggtgatatctggaagattaataactgtccagtttcagagaacattgagtaagcttatcctgcattcctacatgtggagtaaaacagcgatgtattccaaaagagtaaagtaaaataagtaaaattatctcaagtaaactgaattagaaggctttccatgaactgggcaattgttggaaccaagctgttatggggttgctagccagttccagtgtgcccagggttagaatattgactccagatttttatattactcatcctttttatttcttttgagcagcatccagagatcactggttggtttataggagtaagcagggtcagcctaaattgcaggaaaaaactcaaaaacaaccgatgagactagaatctattaataacaagtgtactatagttcttgaaacttaatttctctctccagtttcccatttttactagagacaaattatggtaagactgatttgctttattatacttggcctgtttatttgtataaagtacagcaagaataattatttttgatataaactttttggttggctttgatggaattctgttgcataaggaatctcagataagacttttattttttaagttgagcccagccatgtgtttgtaacctcagacatctatgagttggataaattcctctactcttgaagtcacaagatagcttggggctcctgggcttatcagaaagtgacattcgttgcttatcactgtgggtcaagaaccctgtacagagactgtgtagacaaggtatgaggccagttttctcaagaggcttttattggctttaaagtcaagctcaattccttaaaggaaagcacaccattctggtcaatgccttgataaccagtttcaccaattgtgtcctgttacaaaaggaaacagattcttattgcacttatgcaaataactgtattaccataaattaagaatacccagccgggggtggtggctcactcctgtaatcccagcactttgggaggctgaggagggtgaatcacaaggtcaggagttcgagaccagcctggccaagaaggtgaaaccccatctctactaaaaatacaacaattagctcggcatggtggtggacacctgtaatcccagctactcaggaggctgaggcaggagaattgcttgaaccagggaggcggaggttgcagtaagtgagatcacaccactgcactctagcctaggtgacagagcaagactccatctgaaaaaaaaaaaaaaaaagaatactcacaaatagtttccaaattctggagaaattaggtagagagaaacaaatatgtttcaaattttgttcacaggagtatactttacttaattgtcaaaagctgcaagtaggttaaaagaagttaccttgactctgaaaaacaaagcaaatgatcagcaatttttaagcaaaatgtcaaaaaagtttctttaatcttacattagtttagtccatgcagttaactcatcttctgcttgatagtcataaacatttcagctctccatgagagtccttaatgttttttctctattccaaagttattcaaagtaatcagaaacctgcatttaagagcaactatcaaagtcctgtcactgattatgaaacaatcttttgaagaggatcaaaacaacataacaattttctgtgaatgacaaaatcttttagggcagccacagttaaaaacacgattgacaaagaaatttggttacctttctggcatatgattttatgtaacaattataataacatacactaagtcctattagaattagaggagttttacgtaattttggaacacataccaacaacatatttaaacaaatatagcccaaagaaagccaaacactatttcacatgtgacagtgcttcctgtatgatttttgtaccaaataagccaaatttcacctttacattagtgtactattaatgttaaaaccaattcttaataaaactcattgacatgtctacccaactttaatgtttgaccataaggtgagatactcataaaccttttttaacccttacaatttttataacctttacaattttttgttaaagtgtcgattagtgctctaagaaaaacctgttttgagccaaattccggttgcaaggcagattactccaaagatggttcctagaggggaagagaattaaaaaatggcgaatgtcacactgatatcaaaccagaaaggactcatttcctaagccaggaattgaaccctgaacctgagcagccattgtgacagcagagaccaagagaaagtactgccatgtggttaaaaggtcatctcccaaggatatagaacaagagaagaggagaacttcatccagttttgtttcagggacctgcagcgaagtttgtaaccgaccagttttctgggccattttgaacagcaagcttatggtgtcctaggccaacattctatcctaagatacccctctttatgaccaaacaatacagaaaggcacacaaagcacaccagatttgctacagcttaagattagcctcacagatcctttttcccattaatcaaacctttacagaggagataaacagtgatttttaccattcattcaaccagtttgcccagagggagaaagagagagagagagagagagagagagagagagagagagagaacaaacgaacctagaagcctgactagtaagaaattcttatccttttgctggcatgccgggcttctgggttcccttgccctgagtggccccagtgacccggctggctgcaccaaagccctggctgccaagctgcaacaaagaggaaaattatcgaatttcccctttgagggaggaaaaagctccccatttcccatggtcctttacttgtgtaattctgtcacctgcaactgtcagcaaagactgcaaagcagattactccaaagagcatagcagttaacatcccatagtgctgaacccgttcttatccgaggactttactaagagggtccactaaccccctaaatcttataaaggactctaacattcctaagttgggcctcgaacccaagttcagtcaagcgtccttgcctttttctgagaggagcctttaaatctgtcttaggagagactctgcctcccttaaattgggcgtctaatgcaatcccactcttcactcgggtatatgcaccccacgtgccgaaagttcgccaattggtacatgcaggtgattttcctttgggttgggggtctctttagtttcatttcttccatggtctgccagaaagatgttactggaccccagcacttacccaaagttagtctttgggtcaggagtttccttagtattgttccttccatggtggccggaaagatgttaccggaaaggggtcctgatccagaccctaagagagggtttttggatctcaggcaagaaagaattcagggagagtccatagagtaaagtgaaagcaagtttattaagaaagtagaggaatgaacgaatagctactccatagacagagcagccccaagggctgctggttgttcatttttatggttattttcttgattatatgctaaacaaggggtggattattcatgcctcccacttttagaccatagagggtaacttcctgatgttgccatggcatttgtaaactgttgtggcactggtgggagtatagcagtgagaaagaccagaggtcactctcattaccatgttggttttggtgggttttagctggcttctttactgcaatctgttttatcagcaaggtctttatggcctgtgtcttgtgccaacctcctatttcattctgtgacttagaatgcctaagcatctgggaatgcagcccagtaggtctcatccttattttacccagcccctcttcaagatggagttgctgtggttcagacacccctgacaaacctggtacagttatgaggaatgggagttaggtgtttgttttttgtttttaatattctcatcaggactgttgcctataatatgagtgtgtacaggtgtgtgtatttaaagtgagagtgtgtgtgagttagtgtgtgtgtgagtttgtgtgtgtgtgtgtgagtttgtgtgtgtgtgtgcatgtacagtggtttctacttttccactggggtatgttcttcagtggatgcctgaaacttcatgttgtactgaaccatgtatacactgttttttttcctttacatatataactataataaagtttaatttataaattatgcagagtaagagattaacaacaatactgcataataacatagaactattataacagtatgccagtatcactacttgtgctttggagccattcaaaataacataaaggtgacttgaacacaagcacagcaataccatggcagtccgtttggtaactgagatggccattaagtgactaatgagcaggtagtggatagtgcagagatgctgggcaaagtgatgattcacatctggagtgggatgcaggaggacgtcacaagatttcatcatgctacactgaagggcatgcattaaaacttatgaattatatctggaattttccatttaatattttcaggccacagttgaccatgggtaactgaaaccatggaaagtgaaaccatggaaaagagtggactggtggaatacaactggcatgcacacacatacacacacacacacacacacacacacatatgcttgatatcaacaaagaattacataccatttacagtctggaggcaaaagggaggctgtgatagactgtaatgataaatcctgttctcttgagcactgagttctgttttgttggcctcatctagcatgtcatcctttctctcatcttctggatctgatcactatattttgcttctgtacctccagagaaattatgttggacatttaataattatagaggaaaacgtcaaatcttaacaaatatttaaggagactgtttcaggtacagtgcactggagcttgctgtggagaatgacagagaaacattagatgtggccccttcccataaccacactgattagtatcaaaggcagcaggggcagtgattacaagtttattttttttttaaagaaaaatcacaggccctggtttaaaaaattgctttgtgctgtgcctcacactttggtgagttaagtactcactgcaataccagagaaaagccaaagaatttcattttaatgtagatattttcttttaaaagttagtctttagtacaggaaagaggagtaggcgctaacgtttttatattctcattaggactatacattatttttatatacatgtaaactggggaacaataacaaattatgtaaaatccacagcatggaggttttgatatactttaattaattcctaggtaaaattagtatgcattacagtttacagaaaaaaaatacacaaacctgctaatcaaaatgttcagccaacagagctggggcttttttattagttatattgccttgaatttcatcactgtaccagctggcttcttgtcaagttatagtttggacctttacatcaaacagcaaaaaaattaattacaggagaaggagtcccaatcggaattttgctcttagaggtttttcacaattaaccagacatgaatggggctgtgtaaggaggaaatggaactagagagaaggaacttggtagacttttttagaatcattaactatagcaatgttagttacgggcttccgtgattttgttttaaggtttagccaaagttttcagatttctcatttctagaagcacccagttctgttactatattgaatgcaatgaatcataccatgaattctgaattctcttagaaagggtcccaagcgatggctcaaaaaatgattatcctctcttcattttgaatcgaggaacattctatctattacactactgatcataatcataatttaatgagcagaacgatcatgctttgatggttagtgccagattacttgtaatacgtattttggactcagaactattgttcttaactgtcacagtcattgcctctgtgcgctacagttagtttaaatgtgacttttctaagcctcttatctgttgaataaaccagccaaaggttttaaaaatgcttcctttaacttagctttctacttttcttttttattttgcttaaaagcccttacttgtgacccattcttctagttgctggcattctaatatagtgaatggttctttcacaaatacagttaatctttggatgcctggagaatccaaagaacacatttctctcctctgaaaaatgcatgtgaacatacatacaacattttgcatgaaatattagaaaatcattagaaatgcatgagccccaagttgtgaacacctgttgcattcattgaggaacatataaatgtattatgtacatatgtgtacctatcatattcatatataatttaggaatatacatattgcctaaattcaaatgctgattcagatcatattgtttgcattctgtcaagtcaaaatatgctaaaataaatcaattatattatttgccatcacctgaataaatttagatttctgatccatttttatacacagtagcccttatacacagcacccttacttataggctcatttgggtcaccatatttcactgtactgtctgaattactgccatatatcctaagtaatttgtagcccatagctgagaaggacattcttaacttgttttaatgataatatttttcttcattaggtttgtgagctttgagctagtggaagatactaacaggcattttccagttttctctctcaggccttaagaatggttcactattatcccaaggtcactttgaaagtctttctgtgatttgcttccatttattttatgcttgtgtttatggktttgaaccaaatatgaaatttaatgttgcgtttgtctacattaaacttaatttgccccttgtcagctcgtttacaacagagaaaacattcagagccaccctgtagaatgttttgtctacaatcactgatacaatttttctgtctctctttgttgtatgcaactttctatatttttcagtctaaaaagaggcctctctgaaggaacattttcagaaaatctaaatgtctaatagagattaataaatgattttctaataaaatagaatcattaccgtattttgaattttttaaattaaagttctattttctaacttagaaatttaatttcatattacatattatatgaatatgcttcttgagatgctcttaaagtagtgaatttatactttaaaaagataaatgaaataaaagttaaaatataaacaaaatcttaaattgagttacattaccaaatattaccaaatattttgtgtgcttttttctttttctcagatttttctaagtactgaaattaacctcatgtaattaaatttctccatttaaaaattagttactttttaaaaataatttcaacttttattttagatgcayggggtacatgggcagtttgttatgtggatatattgcatgacactgaggtttggggtgtgaatgtctgtcacccaggtggtgaacatagtacccaataggttgtttttcagccctccctgctttctctctcctgcctctagtagtccccagatgaattttttcttaatgcttactaatttttcaataccattatatggtattgaaatgacaaatattttaaattgatgtatcttagagggcactaaaatgaaacattaaatatacatgwtgaaaaatacttttaaagtagaatcctaaacatatacattaagaaatataatttgtgtgttgaaaattattttcaggagaatctactaacttgtgcctgtatcttcgaatcatgagcagtgttcaaaacttgggaaatgtttgatcctagaatatctgctgtttacctttgagcagatattatatttattcagtttatgttagggaaatatcagacaggtgtacaaagatacatataaaagactggtgattttttataacacagaaatattagaaaaagtcaaaattaccaacttaaggtgattggttaaataaaatttcattacatggtccacaatggaataccatcatggagatgcatacctattgatatgcaaaatgctcattttaaatttcaaaataatatataatgcaagtctatctttgttcaaaaacaagttgtaggtagttggtagatagrtatgaatgtatgtataggtatcaatatagatatagatataaatatacagatgtggatatagacaaaaataaatacaatgtttatcaaaagaaaaacagattattttgtaacatctgtgtgtgtaattgtgatttttaaaaatatttctatgagtggattacttaataaattaataaataaaataaaaataaaacattgtaatagaagtcaatatttattaagcacatactatgtatcgtatatgcttctaaataatttacatgccttacctatttaattgtaattatgctactcttcagtccttattatcttagcctgtttgtcctgctataacaaaccaccatagactgggtggcttaaacaacaaaaactatttctcatagtctggatgctgggaagtcctagatcgaggcactggcagatttgatatctggtgatgccctatttcctggttcacagatggctgtcttctcactgtatcctccacagcagaagaaacaaggcagctctctggggcctgttttataacaacattaatcctgttcatgagggctcaaccctcctgaactaatcacctcccaaagccccatcacctaaataccaccacattaagagttaatatttcaacatatgaatttgggcgaggtggsggggggggcaacttgcagcccatcaccattatttatgctgtagattataagcatgtgaatttttcacactggaatgttagaaataaatgataataatgtaatttcacatttttatggagtccatgaaccctctgaggctgtatcgtggggtgggtgtgtgtttgtgtgtgtgtgtatgtgttttcctggggagcagttacttagcttttaatcagattgtgcgatgagttaatacygtcctctgatagttttagtcaaactcaccattcatttctgtactattgaaaactccactacaaagtcaagatactaasagcaagcaaaactatacagtgaaaatgaatttgttgttttcacctcattaatctacccaaggcagttggtaaagatagcaagcagcaacagcgtgacctcaggtcacattttcaagcaggctaggaagaaatgggagttggggaggtcatcaggtgccaggagtgttctagccagagcagaactctacttttagatagtgcctaaaatgttaattttaagtggtatataatcaactgtcagttaaactacaaataacctttgagagcttattcagaggctttgcaaggtgaacatgtagaatagtgaggctttcatgagggtggatataggattcctaacatagtaatctgatttacccaatcagtctgtgtcttgtaacaacrttattttcattttcaattctgtcttttaagatctaaaacagtagatgattcaaagcacattaatacttggctttgggatatatgtttgtattattaaaatatgaataaatgcatctgtgcagaacttcagcactttaaagaaaggaataaggccattccatgaaaacctgtatgaacaagagccaaatagctagcaaccctttggattcatccttgttacctgtatgggcagctggttctctcctcagaatgatgattttacagatgaggaaaccaagcactagagagattaaattgcctatattcacatcacttataagtggcatagctgtgatttaaacccaagtcttgctaacttggaaatctgtatccatgggcatcatgttgtctaactgactacttttaaaatattatggagaagttgataaactgtagattccagcctactaatcactccagaagtaatgtatccatatcattgagggtaggggtgaacatttttaacagccttccttggtgattctggaatgtaatatagattgaaaagcatagctttacaccatcttatttctgcatcagaggggagatcatgtagcaagttcttatttatgattttatttttcggtagcatttaatgctactsaccaccatccttgggacttttcttagccttctatgttttcttctaatgtcccctttaccctgctaaccattgctctcagtcttccctaacatggcttctttctgccttcagttccttggtatgctggccatggcgttttttctctggtggctctcattatctttgcttattgaggctttataaattactctttctccccacctacaattctctcttgagtttcagtaccttatttttatcgttcttctaaatctacagatgctgatgtttccttcgtgtcttaaatttagcaggcctaaaattgaactcattatcttcttaccccaaactttctgtcaccgttttcctctagtgtagttaacactgtcactactcagccttctgaactcaaaacttcaaaattgcattccgactttccttttcctcactgtcgccattcagtcagtctgtcatcaaatcttgttatttccatctcagaaatgccatttgaatcgatcattcttttctgtgtttccacagaatctcatcatctgttatacattggattccataccagttttcctatcattcaactttccctgatatccagtcttttttccacatggtaccagagatattttaataataaacacatttggaattctcatttccctactttaaaatagcctttgattccctaatgcctgcaatataaggtacaaaatgtatacggttcatcctaatgatcctgctttatctccttaccacaagtcttattttgtggctaaactgaactttttactacatctcactttctcactctgatgcatttgtgcatctgatacatacctggaatctctgtccaggtatgagaagttggtcattcttagccctgtatttccatagaatttacttgtgcacaacatgytatggtagtaattaagagtcagggggctgaaaccagactaactgggttcacaggcccaactccttaattactgtgtaacatctttgtgcctcagtttccttatctgtaaaattgaaataatgatattacctaccttagacaattgtggaagatagggttaattcatgtgcaatgcctacaatcgtgcctggcacataataaacagaaattaagcatgtgctgctgcttctactgtcatcgtgatgacaatgatgtgacagtctccatggaagagggctaaaggaattgtttattaatactgggatcaacccagagatccacggctgtcccagaagaaaagtattttgcctatgggaagcctggatccagtttgtaggctaatatactatcgctacctcatggcatttctagtctcttgtaaatcatccactagttaaaatcccgctagtccttggattggtatgtggacatatacttgttcccagactggaaatcccttcattatcagtaaagattgctccaattgcaattctgcaggtacattattttgctagtttcatggttgaaggagtaagctgtgccatcggtataccttgggctgatgtgaatcagactttagacctagacaggacctttaaatatagcagagggacattccttgtgtcaatttaaagcatcctaatatagcctcataaagtcggctctctgctatgacacactgtggacaacatcataagaaatattatcatttagactgaaatttgaattgagcaaaatgtttgtagacacttattaatttttaagaaactgctatacacctatttatttggatgatatttttatttggatgaatgtggtcctgaaaagttaaatgtaagttgcagaatttcttagcataaagttcactatttaaagcacctctgcagtaaattattttgaattacatcctagcttattagtttttatttattataatattaatatgcagtgtatttgaagtaggatacgtttgtattggctatgatactttctaactcattggagaaatttataaaattaattagaaatttgcggcattaattagaaatttgtagcactaattagaaaatcacagcaataattaattgtagcacatgaaagaaaagtttggaaagtagcatttaatttttagggaaagaaaagaaggcttaaagtagaaattgaacttaagggtaacaataaaaaccaatcggttagatgactaatatctaaaattgattctcaaaatggaaactatgtatttgttactgttttattttatttttaagtttattgggtttctggttctgatcattatagtgagagataatattatatagatccccagccaggggtctcagctaaacacacagaagaataagcataagcatgcaggcacacttgaaatgaaaggtacacactctagtagtaaaaaatagatctgaaaaagaaatacggaaaattcataataaaagtaatgacctgagtttccttagcacctgaagtttacaagatatttgcctaatgtgatgtggtaggaaaaactggattttaatgagaggaactcaattttaatggttgctttcccactatgtgaagttsggcaagtctcttaactggccagagctttggatttctcatctgtgaaatgaatataatagagagttcctttgaggatcaaaaaataacctacatacaaagcctttggaaattgtcaagaattgtacagatttcagagattatagaaatagatatttcagaaattactctgagatcgcagagattatttcagaaatgaaataagtatgacattgataattgtcttcagtttgtgcttgaggaaaccaagatgtgcaacaagtaatgagcagccaaactgaagctggaccctgggcttctgagtcyaaaggtggtacttcctgtgctagaccgtgctatttttgagctacacctgtacatcattcacaggacacaggtctagtaaatgatagcctaaactaaatttaaaaaacattaaaaacatataattattgatttattattagtaagaaattctaatattaataggctgatatttgcatgtgttttgtaatgcaggtaatgaatttgggcatcctgaatggttagacttcccaagaaaaggaaataatgagagttaccattatgccaggcggcagtttcatttaactgacgaygaccttcttcgctacaagttcctaaataattttgacagggatatgaatagattggaagaaagatatggttggcttgcagctccacaggtaagctcttcactctggatgctgtgttttagtcaccaatgaggtacatgcctagaatggcaaccaatttaaatctctatgcagatcttttaaacagcaatttattattcagtgtctagtgtcctgtaccatacttcaggttgtcaaaacatgtcactgaagtctcttcaattgataatgaaaatcttaaacataatgccctgcttagtttcctggtttgtttgttactgtttaaatttagtaatttgtatttttattggttaaaataaacaataaaagctctgcagggaacccattttggaaattgctgtggaaacatcttaattgtttggaacacttttttatgtaaataattatgctgtcataaagaaactactttgacaacatgtaaatttctttattcatttttttttctcttctttagtggcctctaacttgtcatttcaatagatgccattatacctgcatgctgttttgtatttttcatgagcctgtctgtcctctggaattaatgtctcagttttcaacaaattttagaaaatgtaattaacaagtgaaaattttatacaggcttcttttttcctggcaaaagttaacatataatatgtcttcgttataatccatttactttatactggggctgtttgaaattactgttgatgtgtttttactttggtgtctatgattcttttttttttaatggctgaacaaaggtatttatatattcagtaagatttgttccatgacacgaatgccctaatcacgtttattagtaatgctatttccagaagagagagcaaaatgatgctccttttcaataggaacaacgttgaataccaaaaggcaccctgtttactctagagctgtagttcacatttctaaattaccaagagtggtgctgcgggtatgcatggcaataagtcctctcaaagctggggctgagtgagggtggtgttgaaaaagccaaggcttttcacagccaactgtaaatacatgatgatgaagaaaagaagagagtttacagatgtaatttcttttcagaccttatctttttattaagaaaaaaaagtattgtaattgactttaggttgccattgaatctgacaaagttgggtaaaaatgtaaaatgtttaagagaactgtaatttcagaaactacattaaaataaaaatgttacattaaattttgaaaagtaattttatgtacctaaccgcattaagctggagactaaaagtcttacagaaaattcacttataagtagatctaatatatacaaacgaacactttgtagtatgtataggtaccatggttttacttaaaacctgagccacaacactgtttctctatttgtgctatgagggtagcaagtggctggtgagctttgtatactccactaaacaatttttgagactgttcttggctcacagttaggtacagcaaaattgtaacatgttcaaaaaaatatagtgttctgaaatactcatttttggtttaataaccagactattaagaaagacaaaaaataatgtacttgtagcagcatctaggtattatttaaatgtaacatgtgtgctaattcttgcaggcctacgtgagtgaaaaacatgaaggcaataagatcattgcttttgaaagagcaggtcttcttttcattttcaacttccatccaagcaagagctacactgactaccgagttggaacagcattgccagggaaatatcctttttgttaccagtgaatatgactgtccacattcacttctttattacattataggacaaaaaaaaaaaaaagactaaggttgatcttgatgacagaaacattcattttcctcatctgaaaaatgaggaacttaaaatagttgatggataaatctttgctcgactcagttatactgaattattcctaagcttcattttgggtttaaacagaggggttagtgcagacgtggttcacatcaaaggaaagagctgtggatcttgctgtcctgaaggtttcactatggagccctgctctccaggtccccacatccaccaatacagaagacaataaatgaagtcttctgagataatagcagaggctctggacttaggggaccaggctttaaaaagtataactgaatatttcttaaataatatttcttaaataatatttagagcagcaatatgggagacgattgtagttttactctatgaaaatattttgtaagttacctctgagacttgtttcttttcctccactcagtgggagagagcaaacagtagttgtaatgatagtgtccttcctttttctgtttcttctcctaaaattcaagacacagcatacctttgtaggcctgaattggtaagaaggcaaggcaggggaggtgtgagcagtagaaataaccagggagaatgtttttgatgttctctatgtattcatttactccttttttcatgcattttacagatacttactgagtacmtatttactgaacaccttatagatacttactgagtacctatttactgaacacctctgtgacagctctgagctgattactgtaaatataggaattctcctagcagatacagtcactgccgtcatagagcttttaaactagtaaagaagataaatattaggcattgtaagtttgataattattacaaaggaaatgtacagtacattttaaagacatgttactagatccatgaaaaaaatgacagattcaggacctagcaataaatcagcacaatttttcaagcaggcaatagaaataatgtgcttgccccctgaagccctaacaatgattagcatctgccacctgagcaaggtgcctgatgccaacatgaagtcctatgtgtcagggtggctccagctacaataaagaaaccctcctactcagctggctcaaataataaggaaaatgtatttgtcacataataaaaaccctaacgtctagtttccccagcacttgtgacagtatcaagttccccagttcattctttttgctttcaattctcarggtgccagcaatgtccaaatggtggcacctgttactaatcattagataagagccatgactccaagtgtcacccaccttcagatacaacaaaatgcaaacagatttttttgtgcatctcttcaagaataaacttacttctttagcaaaatttctttcatattttattgaccagagttgggtctcacatctcccagaaaaattttctaggaagaagaatgatattaacatgagtggcttaatcaggaattacccctgagtctcaggaagacatcccttgatgaagtggacacccagacagaattttactctgacagtaagaagaaaacagacagtgctttttagtaagtagcctgcagcatctgtcaccaccccatgctgctcagtgacattgagggcaaagagagatggttccctactttcttcccacccagccaatcactgttccacataacatcagagcatctaggagaggaggctgtagttgtgactgatagcacaaatgtgctccagttaacccacagaatgcgctgtgttgtctgtctctttatgcctacagataaatcaatgtgatgggttatctacactaaagaagtacagtactattctgggaaacaaatgtcctcttcatttccatgaggaaatccaaacaaatactagacatgtagcaatttgtgcgtgatccttctcacctccagagtgctaaagtaatgctcctagactaaacccttctatacttggtagtgcaatataatcaaaccaaaatacatttacagaatactagtatctacttcaatctttgttatatctttgcagcgctttccttgacccttaagtggagggaaagagatgtataaaacccaaactgcgacgtaagtcttaatgcaataaatggaaaaggaacaaggagcaagaatgttccatgggagaacagaggacaagaaaaatgaaaaaataagtggcaggggaggaggggagagataacgagattaagacaaagacttttaagcctagacttgggaaatggacaagattatagcaggaacaaatgaagaaagccatttcagctattagaaatcgtagactattcttagataatggacagtacaatggattaattggagaatgatgactatagaaagaagtattaagagataaagctgaaaacagatggagatcacataatagaagattttaatgccatattaattagtcttttttctatgattttatagtgagttgctgcaggtttttgactagggagctacttgataagaatgtaggctttagtaaaagttctcatgtaccagtgtgtaagggagctttcatgaggaaagagattggaagtacagatattaattatgagaaattgcagtacacctaaaagataattagggcatgaactaaagtaatgtcaatagaatagaaaaagtatacgaaaccctttcttatagtgaaggaactcagaatctgtttgaacatggagtatagaagggaaaatgtaaggtttcactttgaacaatagaaagtatgctggtggtattattcctgaggatagcaaagccaggagaggcagccagttgcgggagtagaaaatataaattcgtgcaagatggttgaatagaactctccagccattgtcctccctacaggaacaccaaattgaacaattatccacacaagaaagtacattcataagaaccaaaaatcaggtcagcaatcatagtacctcattttaacattatttcaagcaaagaggcacagaagagggtaagaaagacagtcttgaattccctataccaaccctcccccaccccttggcagcaccacatggcacatggaagaagagaatctgtttgcttaggggagggaaaacacagtgactgtgggactttgcattggaactcattgctgccctgtcacagcagaaggtaacatgggcagaattcagccagcacccgcaaagagagccattagaccagccctaggcagagggrtattttctgctgtcccagcatttggaacctgagttccagctagacccaacactgcacactaaagtaccctggggttccagataaatttgaaagtctagaccacaaggactgcagttcctaagcaagtcctggtgttgtactgggcttagagccagtggacatggggtacacaagaaaggagagggaagagtaaagaggactttttcttataactcggataccagctcagccacagtaaaataaaacaccaagcagagatctgaagcccctatttcaggctccagctctcagaagacatttctagacccaccctatgccttaagggaacttgcttccctgaagggaagaactcagtcctggcaggattmtttaattaatgacggaggaacacttggaccttgagtaaacatcaacagtagccaagtagcaattgccacaggcctttgatgagacccagaaccatgttggcttcagatgtgacccggcacattcccagatgtgttggccatgggaagagactcctgcctgaggaaaggagagggaagagtgaaaagggctttatcttgcaacttggggatcagctcagccacagtaaaagaaaacaccaagcagactcctaaagcctccagttttaggccttagctcctagctggcatttctcaaccttccctgagccagaagagaacccactgccctgaaaggagagacctagttctggcacgattcaccaactgctgactaaggagcccttgggctttgaacaaacatcagcagtaaccaggcagtgggtgccatggccttggggtggtggtggccatggatagagaggctccttctgcttgaggaaaggaaagagaagagtgaaagggacattgcttgcaatgtgggtgccacctcagccacagtaaaatatggcatgaagtaggtttctaaagttcctagtgccaggccatagcttcagcatggcattcctagacctaccctgggccagaagggaacatactgccctaaagggaaggacccaggcctggcaggatgcaccacttgctgactaaagaacccttggcctttgaataaacatcactggtacccagacaatagtcaccagagactttcggtgaggactagtagtgtgctggcttcaagtgtgacccagcacagtcccagtggtgttggcaatgaacttgcttgcatcaccccttcctccaattccaggcagctcaggatagagtgagagatgacctttgtttaggggaaagtaaaggaagagaacaagagattctgcctgataatccagtgaattatctcagatcttaactaagaccatcaaggtagtacctctatgagtcaacaagagtggagccccttaatacggataccactgcaatgaccaaagacttagatcacaacacccaagtcttcaaatacttagaaaaccttcccaaggatcagtataaacaaggctgacccatgaaggctacaataaatacctaattattcaatgcccagacactggcaaacatccacaaacatcacgaccttccaggaaatcatgacctcaccaaacaaactaaataaatcaccagtaaccaatcctggagtgacagagatatgtgacctttctgacagaaaaaaaaaaaaatgaaatagcaattttgaggaagctcgtgaaatgcaatttaacagagaaggaatttagaattctatcagatgaatttaacagagagattgaaatgcttttgaaaaaatcaagcagaaattctggggctgaaaaattcagttgacaaactgaagaatgcatcagagtttctcaagagcagaattgatcaagcagaagaattagtgagcttgaagacaaggtatgtgaaaatgcatagaaaagacaaaaaacaaaaaagaatgaagcatgcctacaggatctasaaaatagcctcaaaaaagcaaatctaaaagtgattggccttaaagaggatggagagagagagagagagagactgattcattcaggtagaaagtttattcaaagagatagtaacggagaactttccaagcccagagaaagatatcaatactcaaggacaagaaggttgtagaacacaatgcagattttacccaaataatactacctcaagacatttaaaaatcaatttcccaaaggccaaggataaagaaaggatcctaaaagcagcaagagaaaataaacaaataacatacaaaggagctccaatacatctagccgcatacttatcagtggaaaccttacaggccaggagagagtggcatggcgtacttaaagtgctgaaggaaaacaaaacttttatcctagaatgttatatccagtaaaaatatcctccaaatatgaaggagaaattaagactttcccagacaaacaaaagctgagggattttgttaacactaaacctgacctacaagaaatgctaaagggagtacttcagttttaaagaaaaggatgttaataagcaataagaaataaccttaagtcacaaaactcgtaataataagtacacagacaaatatggaatatgataaggcctcaactgtgttgcacgaactaactacaacagctttttaagacatagacaaaattataataagatataaatacaaacaaaaagttaaaatgctggcaagatgaagttaaaaggtagagtttttatcagtttttctctttgcttgtttgtttttgcaatcatagttaagttgtcatcagtttaaaatagtggattatatgatgttacttgcaagcctcatgagaaccacaaatcaaaaagcctaccacagatagacaaaaaataaaaagcaagaaattaaaacatatcaccaatcaatttcacaacaaggaagacaagaaggaagacaacaagacaaccagaaaacaaaaaacaaaatggcagcaataagtccttatcagaaataacattaaatgtaaatggactgaactctccaatcaaaaacagagtaccttaatggataaaaatacaaaacctaaatatctactgcctacaataaacatgcttcacctataaaagcactcatagactagcaaataaagggatggaaaaagatattctatgcaaacagaaagcataaaacagcaagagtagctgcatgaatatcagataatatagattgtgagacaaaacttataaaaagagacaaataaggtcattatataatgacaaagggtcaattcaacaagagaatataacaactagatatgcaccccacactggagcatccatatatataaagcaaatattattagagctaaagagagagatacacctcaatccaataacagctggagacttcaataccccaccttcacctttggacaaatctttcaggcaggaaatcaacaaagaaacctgagatgtaatctgtgctatagaccaaatgcacctgatacatatttacagaacatttcatccaacggctgcaaaaggcaagttctcctcagctcatggaacattcttttgttttgttttgttttgttttatgattgtctttttttaaaattatactttaagtttagggtacatgtgcataacatgcaggtttgttacatatgtatacatgtgccatgttggtgtgcttgcacccattaactcgtcatttaacattaggtatatctcctaatgctatccctcccccctcccccctcctcccaccccacaacaggccccactgtgtgatgttccccttcctgtgtccatgtgttctcattgttcaattcccacctgtgagtgagaacatgcagtgtttggttttttgtccttatgatagtttgctgagaatgatggtttccagcttcatccatgaccctacaaaggacatgaactcatcatttgttatggctgcatagtattccatggtgcttatgtgtcacattttcttaatccagtctatcattgttggacctttgggttggttccaagtctttgctatcgtgaatagtgccgcaataaacatacgtgtgcatgtgtctttatagcggcatgatttataatcctttgggtatatacccagtaatgggatgactgggtcaaatggtatttctcattctagatgcctgaggaatcgccacactgtcttccacaatggttgaactagtttacattcccactaacagtgtaaaagtgttcctatttctccacatcctctccagcacctgttgtttcctgactttttaatgatcaccattcaaactggtgtgagatggtatctcattgtggttttgatttgcatttctctgatggccagtgatgatgagcattttttcatgtgtcttttggctgcataaatgtcttcttttgagaagtgtctgttcatatccttcgcccatttgttgatggggttgtttttgtcttgtaaatttgtttgagttcattgtagattctggatattagccctttgtcagatgaatagattgcaaaaattttctcccattctgtaagttgcctgttcactctgatggtagtttcttttgctgtgcagaagctctttagtttaattagatcccatttgtcaattttggcttttgttgccattgcttttggtgttttagacatgaagtcctttcccatgcctatgtcctgaatggtattgcctaggttttcttctagggtttttatggttttaggtctaacatgtaaatatttaatccatcttgaattaattttaatataaggcgtaaggaagggatctagtttcacctttctgcatatggctagccagttttcccagcaccatttattaaatagggaatcctttccccattgcttgtttttgtcagatttgtcaaagatcagacggttgtagatatgcggcattatttctgagggctctgttctgttccattggtctatatctctgttttggtaccagtaccatgctgttttggttactgtcaccttgtagtatagtttgaagtcaggtagcgtgatrcctccagctttgttcttttgacttaggattgacttggcaatgcgggctcttttttggttccatatgaactttaaagtagttttttccaattctgtgaagaaagtcattggtagctggatggggatggcattgaatctgtaaattaccttgggaagtatggccattttcatgatattgattcttcctacccatgagcagggaatgttcttccatttgtttgtatcctcttttatttcattgagcagtggttgtagttctccttaaagaggtccttaacatcccttgtaagttggattcctaggtatttgattctctttgaagcaattgtgaatgggagttcactcatgatttggctctctgtttgtctgttattgttgtataagaatgcttgtgatttttgcacatgattttgcatcctgagactttgctgaagttgcttatcagcttcaggagattttgggctgagacaatggggttttctagatatacaatcatgtcatctgcaaacagggacaatttgacttcctcttttcctaattgattaccctttatttctttctcctgcctgattgccctggccagaacttccaacactatgttgaataggagtggtgagagagggcatccctgtcttgtaccacttttcaaagggaatgcttctagtttttgcccattcagtatgatattggctgtgggtttgtcgtaaacaaagacacaacataccagaatctgtgggacacattcaaagcagtgtgtagatggaaatttatagcactgaatgcccacaagataaagcaggaaagatctaaaattgacaccctaacatcacaattaaaagaactagagaagcaagagcaaacacattcaaaagctagcagaaggcaagaaataactatgatcagagctgaactgaaggaattagagacataaaaaacccttcaaaaaatcaatgaatccatgagctggttttttgaaaagatcaacaaaattgatagaccgctaggaagactaataaagaagaaaagagagaagaatcaagtagatgcaataaaaaatgataaaggggatatcaccaccaacccccagaaatacaaactaccatcagagaatactagaaacacctctgcgcaaataatccagaaaatctagaagaaatggataaattcctcgacacatacactctcccaagactaaaccaggaagaagttgaatctctgaatagaccaataacaggctctgaaattgaggcaataattaatagcttaccaaccaaaaaaagtccaggaccagatggattcacagccgaattctaccagaggtacaaggacaagctggtaccattcattctgaaactattccaatcaataacaaaagagggaatcctccctaactcattttatgaggccagcatcatcctgataccaaagcctcacagagacacaacaaataaaagagaattttagaccaatatccctgatgaacgttgatgcaaaaatcctcaataaaatactggcaaaccgaatccagcagcacatcaaaacgcttatccaccatgatcaagtgggcttcatccctgggatgcaaggctggttcaacatatgcaaatcactaaatgtaatccagcatataaacagaaccaatgacaaaaaccacatgattatctcaatagatgaagaaaaggcctttgacaaaattcaacagcccttcatgctacaaactctcaataaattaggtattgatggaacattcttaaaaatagaccatatgttaggccacaaaggaaatcctaaaatattcaaaaatattgaaataatatcaagcatcttctctgaccaaaatggaataaaaccataaattaataacaagaagaattttagaaactatacaaacacattcaaatagaacaatatattcctgaatggccgtataccaatgaccataccaatccaaggctaggtcaagaacgaaattaagaatccctatcaaaataccaatgatatttgtcaaataaatggaaaaacaatcctaaaatttacttgaaatcataaaagacccagaatagcaaaagacatgttgcacaaaaagaacaaaactggaacaatcacattacctgacttcaaattatactacagagctatagtgaccaaaacagcatggtaatgccataaaaacagacacaaataccagtagaacagaatataaaaccagaaatcaatccatgtatctacagtgaactcattttcaacaaaggtgccaagaacatacaatggggaaaggacagtttcttcaatagacggtgctgggaaaactggatatccttatgtggaaaaatgaagctagatccctatctctcattatatacaaaaaacaaatcaaagtggattaaagactgaaatcttagacatagtttatgcctaaactaagcataggcaatcaaagcaaaaatgtacaaatgagatgagagcaagttaaaaagcttctgcacaacaaaggaaacagggaagagacaatccacattatgggaaaaatatttgcaaactgtccatctggcaaaggattaataactagaatacataaggagctcaaacaataggaaaaaatttaataatcttatttaaaaatgggcagaagatctgaatatacatctcaagaagacatacaaatgacaaacaggtgtatggaaaggtgctcagcatcactgattgtaaaagaaatgcaaatcaaacctacaatgagaaatctcaccccagttaaaataacttttttccaaaagacaggcagtaacgatcctggtgaggatrtggagcaagtagaaccctcatacactgttggtggggttgtcaatcagtacagccagtatggagaacagtatggagattactcagaaaagctaaaaatataactaccatatgatccagcaatcccactgctaggtatacacccaaaagtaaagaaatcagtatatggagcagatrtttgcgctcctcttttattgtagcactgttcactatagccaagatttggaatcagcctaagtgtccatcagtacacgaatgaacaaagaaaatatagtacatatacacaacggaatactattcagccataaaaggaatgagatcttgttatttgcaacaatatggatggaactggaggtcattatgttcagtgaaataagccaggaatagaaaaactaactttgcatgttttcactcatttatggaagctaaaaattaaaacagttgatctcatggagataagagagtagaaggatggttaccagaggctggagaagggtagtggggtagtgagagggaaatggaatgcttaatggctacaaaagcatagtttgatagaatgaataagacctaatatttgatagcacaacagggtgactgcagtcaacagtaatttattctacattttaaaataactaaaagtgtaataggaatgtttgtaacacaaaaaaaggataaatgcttgagatgatggatactctatttaccctgatgtgattattacatattgtatcctgtatcaaaatatctcaggtaccccataaacatatatacctactatatacccataacaattttaaatttaaattaaaaaatcattttatcattgtcaacaaatggaaatgtatagaattttccatgatgatatttaggagaaaaatcctgggtcaagctataaggatctatctaaaatatattaatatattaactttaacaaatattgaatattatgaaagcatacataataatatatgtattatatatattatatagcatagtgtattactgtgacccccataagtcagcaagacccccaaatgttagtttatatatactgacacagaattacactgtatatgaaagcctggttcggttttgaaaatcttgacacaaattgggtcttctgaaatttagttatctgcttaaatgtctataggtaatttttacatgaaaattttctattttaataaataaatactcaatgtttttacattagtcacctcttctggaagctatactagttataagttgcaatgatacagacattggaaaactgagtcgtctctttatagaaattatagttgaatcctcagtcatctaattggtctccaagagaaccatgaagaaatattgttgacctatttcccacattttgcctgttacagatttgtgcccacttggactttaattattcttaccacccatctcttccatgtctttctgttaacaagtagtaaattcacatacattattgctttttctgagaatatttgcattttaataattctctttgaatactcacaaagtattgaagatgtaatggtctaaataggtaatgggagaattgtatcatgttttttactttatatattttaaatttggggggggcaggaagggagcaggagagcatttccaacataatttacaacgcaccttctaattaagtatattttaataacaccagccataactctgagactgaaatcacaacatcttccttttgtgaggtactctgctccaccctcccagttcagtgcagaagtcccatctagaaatttcttacaaataatcacctgttattcgaatactttgcagtgctaagaatatcactgtttcacaagataaacagtattgttttttaataaataaaaatgttatcttaaaatcaacgcattagttctgtactctgaggctaacacctgttctatgtgccagctattcaaatcagaaaggcatttaacatgcttcttagattaccacctctccctgctttttcctcttccagaccagatatggctagtttcttaaatcgattctcatgatactttccagacctcttaccattgcatctcccttattaaaatgcacccagcattgttcacattcctcctacactaacagcagagtattctagatacggtctggcaagtatgacatacagagccccattaccttcctttattttgatgctgctctcttattcatggagttaaagttgcattagctttcctggcagccatcacattttcctttcacattgtatttccatccaaacaaaaatcttgggtttttcttttgtatcctagtattgtgtcatatcttcctttttctttatttattcagttaataatttcaacctaaaatcccaaatttaacattaaacttggaaaagtacaatattaactttgaccctctaacctattagaaaagataaaagaatattacaggacaattctctgttattaatctgttaggattgtagcatctcccataaccagcaaatggatctcttcttttaactttttgttgttccaagcttagctttaagagtcctttttcttctcccttgcattttttgtctcattttggccttttatctttctgactttattcttgtacttttaacctacagtgtagttcaatattatagaatgaattcagatatacaaaatattaaaaattaggatttcaatggtatattttctgtctttagcaaaatattctatgccattggtatttctaactactgagcaagtgaattgaatacagatttttactgtgaagagtctaccatggcaagattgcatgtgttaatcaagtaataaaattcatcaaatttttaattccctgggaagcaggatttggtgccagaataaatttaacttttctaaagaagccacttaaacttcctctgtccctaggaaatataaccctgctataggtaacatgtctgaatttttgaacaggttcaatttttttgaacctgtagatcttgtatatcaaatagcaagacatcaattttcactcaaacctgtggagaatagatggtgactgccatcccaaaaactgttggaaggggagctgttttggaggtaatgccaggcaaggtagaagaaacactaaggatgcttttaactatctcttcaaaataagagaatacgtttggaaaactgagaggcaagactgatttgtatcaataaagctttgaatgtggccttcatggtgactaccaaaggacatcttataattgtttctgcagtagaatctacagccatattctaggaaaaaaatcaagaaacaaaacgacaacaaaaaccttttgcctgtatactctcacatttgtctttttagctgctaatcttcagtgtaataatcaccaatattctttaatgcaatagatagaaatgtgggtaatgctgagacctacatgtacttaataaataggcaggtttcatatttcatgcttagaaagataaaatacattttcctgatgtattatattcacttaagttttcacattgtttagctgtaaagaaagaaacataatgccttttatatcatcagaatcattattatatttctttagtggcatttcttcacctagaacattatcaagttggcattaaatcagaaagaatactctgttcccaagaccagagtgctctttctaatgcatttgaacaatacaaatgattataccacattttaaatgatgtggggagaatgtgagtattagggcccctcttttgtgggccttctatttgctaatcatttttataaagtattcagtttaatatagtatagtaataatgaaaaagtttgaaacgttgcgataattaccaaaatgtgatgcggagacatgcagtgagcatatactgttggaaaaatggcaccgacagagttgcccagccagggtttccacaaactttcaatttgaaaaaaacacagtatctgcaaagcacaataaagtgaagtgcacaaagcaacttgtgactgtattttgggccacactataaggcacgttgtagagactgaggcctttaattaactgaagccttccctccagcccatggcaggtaaaggttaagcagtgttttccatagcccatattctttctgttacaccctggtgcctctttctgttcctggagtatgtacatgtggttgggggtggtagcaatggtggtattattgatgatttatttctgtaatgttcaaaataattttgaaaatacttctgggaatataagtagaataagaaaattacatacagacttgtggcccaggcaggtttctttctaatcaactcacttttctcactgccctgccataacctctgacaaattcttccccagaaattcttcttggtgatcttgtttgccatcttccacaagaagaaaaataattttaaagcaaaacttacatgtgaagttcaattattgtgatttttttttctgtattctagagtagaatatgaatgtgtcatggttctattttcagagttaaactgatgtattacatcagtttaagttaatacatgatatacaatagaaattttaaccccccccagcttatttataaagtgtttgtgttggtatatacagataaatatcattctgagaccataaacaacacaagaatcaaatgtttaaattatttatcagcatacttttgaggtgggagtggaaatgatagtgtagtaacagccccctttccaaatggcatttcaaactgttacaatgttgtgacgttaagaggagtgttcatgaggtatggcttgtgaagaatatgtgaatctaggactaaatctttaaacccaagagagcagaggtataaatagttgaatttgacctgagatagttgaaatattttcattaaaccactgcaagatgcactttttaaaatgtaaattcatactctgacatttgcaacctgtacacagagtttctaataagcaaataaggtcacttggatgatttactgcagtgtgattgctgaaggcagagatgttgctatgagttgcttggtttacagaaggctttgaagtgtggtgatgtaacactgtgtttattagaatctatgctttttgcaacaaataaaaacaaaggacttaatttaggattagctaactaccacattctatccagattatatatgtaaaggataatttctggtctgactaaatagagcatctcaactttctagttttccaggttttagatactttggtaaaaaagcaaattcagggttttctccagaagttctacacagtgactttcaccagatacaggcatgtttctttttcctttatgttatgctgcaatttattgatgatgagctttatgagagctgagacagatgatcctactaacaattttatatttaatataggtcctccttttttaaaatagctttataatggatgcatgctcattgcttargttcactttctttagttttgaaatgactaatacttttaaacatagaggtccttttgatcattttttcattgctaaacactgtctaacaatccctatgatttaatgataatgacagaccagtaccctcacctccctggtcataaaaagcctatgatttagcttcatttctctacccaggaattagggatgaatcaccaagtaagaaaaatattttgcatgattaaaatattgcaactgctataacacttttagattgccttaatatatattcataagattataggcagtaatgaatagtgagcaagtccttactgcacacgaatgtatttagttttggggtttttycttgaagggggaccaggggcctgttgttttgaatagccatcacggtgctgtcaaatatttaacagcagttctggtttttttgtttcatagctcagttgtgcaatgatggtctcttcacttcagaaagtcatctaacaatagcccagtcaaaatttctgtcttctatttcttgcccttctggaggaaaaatatatcagaaatattgtcataacctttaaagaagacagtgcataatcacctagtaatagtatccttcattggggtttgggggggaggaacatttgtgcccaaggtgatcattttcatcaatttttaaaaaggagatactattatgtgtttgtaaacttcgagatggatgataagacagagtattacctatatatcaacaatgatatgtttacttagaatacactaggtacctgtaaacagagagctaaatctctgataggagtatggatagaggggttgatgaactgatagactgactgacagatggaaggatggatggataaatggagtatgtagctacctagtggtgaaataactcctgaaggtttaaaattatgtaattaaaagacaaatagtactaaaatgatttgcttctcccttaaaacagtaatttaattaaatggtataaaaattgataagctattatcaataaaatacatcataattttgtagaattcacaattaatatattattatactatgatgtgcttgctgagcagatcttcataataagatctactgtctcttataaacttaatatatgtcctgcactctgaaagtattttatactcattaccacattagctaaccatttcttttcctagactgcaaatatggaagaaggcaatctacaggcataacttggagacagtgcagattgggttccagaccactggaataaagcaaatattgcaatatagcaagtcacacaaattttttggttcacaatacatatagaagttatgtttatactatactgtagtctaataagtgtgcaatagccttatgtctaaaaaaaaatgtacatgccataatttaaaaatactgtatgctaaaagatgttaatggtcatctgagccttctgtaagtaataatctttttgctcatggaggctcttgccttgatgttaatggctcctgactgatcagggtggggtttctaaaggttgtggtggctaagacaacaatgaagtttattacatggattgactcttccttttatgaaagatttctctgtaacatgtgatgctgtttggtaacattttacccacagtagaactctttcaaaattagagtgaatcctctgaaaccccaccacttagttgataaagattacctaggtttatattatattccaaatcatttgttgccatctctggcatcttcatcagtaatagactccatctcaagaaaccatattctttgctcatctgtaagaagcaattcctcatccattaaagttttatcacgagactgcagcaattcagtcacgtctttaggtttcacttctaattctagttatctttcaatttccactgcatctgcagttagttcttccactgaagtcttgagtttctcaaagtcatctatgagagttggaattaacttcttccaaactcctattgtgttgatattttaacctcctcccatgaatcacaaatgttcttaatggcatctagaatggtgaatcctttccagaagattttcaatttgctttgccgagattcattagaggaatcactgcttatgacagctatagtcttacaaaatatatttcttaataagagttgaaagttgaaattacttcttgatccatagggtgcagagtgcatgttgtattagatggcttgaaaacaacattaatttccttgtacatctcagtcagagctcttgggtgaccagatgctttcatcaatcaggtaatatttgaaaggaatcttttttctgagmaataggtctcaagcttgggcttacaggctcagtaaaccatgctgtaaacagacatgctgtcatccaggctttgtggttacatttatagagcacaagcagagtagactttagcataattcataagggcataggtttttggaaacagtaaatgaacattggcttcaactcaaagtcaccagctgcattagcccataacaagagagtcatcctgttctttggaactttgaaaccagatactgtcttcccagtagttatgaaagtcccagatggcatctttcaatggaagcctgcttcatctacactgaaaatccattgtttagtgtagtcacgtttatcaatatcctagctagatcttctggaaaacttgctacagcttctacatcagcacttgctacttcaccttaaaattttatgttatgaagatgtctttattccttaaaccttaagaaccagtctctcctagctttaaacttttcttctgcagcttcctcacctctcccagccttcatagaattgaagagagctagggccttgctggattaggctttgacttatgggaatgttgtggctagtttgatcttagatccagaccaccaaaaacttcttcctatcagcagtaggctggtgttcactgtcctatcactcatgcgttcactagagtagcacttcttatttctttgaagaacttttcctttgcgttcacaacttggctaactctttggcataagggacctagcctttgtcctgtctcaactttgaacatgcctttctcactaagcttaatcatttctagtttttgatttaaagtgagagacatgcccctcttcttttcatttgaactcctagaggctattgtagggttattaattgggctaaattctatatggtcttagacaatacggaggcccaagaaaaggggaagagacaagggaacggccagtaggttggaggagtcaacacacacatttattaagtttgtggttgcatatgtgcatgatttgtggtgccccaaaacaattacaatagtaacaaggatcactggtcacagatcatcatcatagacataatgataatgtaaaaataatataattatgaatagacaatcatatattaatatatattaataatgaaaaagtttgaaataatgcaagaactaccaaaatgtgacacagagacacaaagtgaacacatgctattggaaaatggcacgaatacacttgctggatgcagcgttgctacaaatcttcaatttgtaaaaatgtgtatttgtaaagtgcaataaagtgcgataaaatgagctatgctggtgcagtagtatcattggcctgaaagatttcacattgagcctttccttttaaagttaggctttacttaatttatccaaaatatatgtttttttttctatttaaaaaataaattgtattagtcatctttatacctgataccagtgtgttttaaatagagcattctatgtctaaactaaatttmtgacatggatgttatattacttttccttctggccagtagaaattacctttttcaatgagtatctcctgcctgcctacgtgagatattattcgtgtttctgacattttccgtgaagctcttcttaatcagaatctcacaggatcaaactgagtggtcagtgttttatttacataaaagtattacctgagtatcccagatgatttcttaaaattaagatgtgatataattactggctcgctaaaattacctacgggctcctaagcatttttgaaagctgcaaccaaaagaagtttctgtttctcagagaaagttggaaatattagagccaaaaacagtgtgttcttggaagcagtggattcagttgtaatcatgcataagaaccatctctaattctattaatgtagtttctgttggcctaatgatgggaaaatgcctaattaattcctataaataagcattaatttacaaaattaattatggttattttttgtagttatgtggtatcagctgttgaataaggaaagtgtttagataatatcaaataaaattatttaattaacatataacygaatgaaatgattacactcagtacgttttattgtcacacaatgatcattttatttcaagaacattaattaaaatgaaaaattattatgtttgtatgtaaaattataaacattactgggtttttttttctcatgtgttctttattatttagagagagagccaattttcactttgccagcctccctattaacatctgtcctttttgccagctgaagaaaacaaaggaaaaacaattttctcctgtagtagcattattttctaattctgaaacattattttcttcagtttgttctctacttctaacatttttatttcccattggctcatgtaacaaaggtctccagaggtaataggtatttcttgttcttatatttgtaaacataaagaaatttrctctcattgcaaggatagtgkttagcttgagctctagaatattgactatctgaggttcaagttccatctctgccacttagttttgttttgaaaatagcctctttgtttcttggttattatctctagaacacctattcatagaattgttgtcagaattaaattagttcatgattagttaacatgcatgcaaggcttaacaacagtgtcgcccacgtttgagcttagcaagtagtaagggtaatggacatccttactgtcatcatcttctaaaaatgcattagaaactttataataaaaatgaatttttataaaaaagaaagacaaataggtactaatcctgtctgttgtcttttttctattgtcctactttttgttttttgttttttttttgggggaacaaaacaataaacacctttattacatgggtgaagacaaaacgaggatatatttgcctttccgggccttgattttcctaagacagaactccaactctttgccctctagcacatagtgttttgttttttgatttttgttttttcgcatgtcctagttcccatttcaccacgacacagtgattcctttcagtcctttcgcagtactggaattgaaactcttctgttccctgttaaatctcttcctcactcttgtactatttgcccacctttctttcttatttccctttctctgtatcctgcagcactgtcttgatttctttttctttccacctattcttcatgttatcttttttaagatctaaatccatttattcatttttcttgcacttttccctgaaaaattcacccacccttcagctatcagctctatgaagatgttccctaatgattctccccaccttgacctatgccctattcaccaagcagtgggcaattttgtgatgtttaatgactgttaggcaaaactgggcagcatggaattataaatttttgaaactgaaaaactctagtataacctagctcagcccattcaaattaaacaaaattacttgggttaagatatatataagcttattttttttcaatttttatgagaatttaattagtcgtatgaatcatgtgtctgaaatacaagcttattttaagagatcaaaattagtaccaaaagttaaatttgcatggcaatttacartatgcgaatacttttacttacattaacccatcttatcctcacatcatctccagtgatactggttaggcaagcattttttgtcctcaatctacatgtgaggatcagaaagatttataattttcacaaggtcgtatttctagtcattgaataaatgtgatttaaatctagtttctctaaattcagtacagttttacatttsgtcaccagataattcatctttttgttgccctctagaaatgccattgaagtacatgaagtgtgtctcactaattttggtttttttctctatttatatttgtagaggttaatgatgcctttgactaaatgtttttctgcagggtaataccatcctggtttctgacactcaaaagcacagatgaatgttagtggaaaaattttttccagctgtatgtatatatatctttttaagttctacttttatttagattcatagcatacatgtacaggtttgttacatgaggttcttttgtttgcttgcttttgtttttgtttgtgtgttgcgaagttttgggttgtgaatgatcctatcagccaggtagtgagcatagcacccagtaggtattttttcagacactgcctccatcccactctcccggctctagtaatccccagtatctattgtttccatctttatgttcatgtgtacccaatgtttagctcccacttataagtgagaacatgcagtatttggttttctgttcctgtgttaattcacttaagataatgacctctagctacatccatgttgctgcaaaagatatggtttcatcttttcaatggctgtgtagcattccatggcatacatataccacattttctttatccaatccaccattcatgggcacctackttgattccctgcctttcctattgtaaatcgtattgtgataaacatacaagtkcatatgtcttttttttttttttcttgtaggacaatttattttcctttggatatgtagccggtagtgagattgytgggttgaatggtagttctgttttcagttatttgagacatttacaagctgctttacacgggagctgaactaatttacttcccaccaacagtatataagtgttcccttttctctgcagccttgtcagcatctgttgttttttgactttttaataatagccattgtgtctggtgtaaaacggtctctcattgtggttttgacgtgcatttctctaataattagtgatgttgagcatttttttcatgtgtttggtgaacgcttgtatgtcttcttgtaagaagtgtctggtcatgtcttttgcccattttctaatggggttatttggttttcgcttgttgagtgtttaagttccttatgaattccataagactctggatattaaacatttgtcagattcataacttgcaaatattttctcccattctgtatgttgtctgtttactctgttgattgtttcttttgctgttcagaagctctttagtttaagtcccacttgtcaatttttgtttttgtttcagttgcttttgatgagttagccataaattgtttgcaaagactgatgtcaagaaaggtatttcctaggttttcttctagggtttttatagtttgagttcttacatttaaatcttttgtccatcttgagttaatttttgtatatggtgaaaggtcgaggtctactatcattcttcttcatatgactagtcaattaccyagcaccatttattaaatagggagtcctttccccattgtttatttttgttttaaagcataactgataaataaaaattatctatatttaaagtacagtgtgatgttttgatatacatataccttgtgagatggttactacaatcaagctaattaacatattcctcacctcacatagtgaccattttcttgtgtgtgtgtgagaatgcttacggtcagctctcagcagatttcaagtatataacacattattaactgtagtcactgtattgtacattacagcttcagaacttattcatcttataactgaaagtttgtataaaatatccccgtgcatgtgtgtttaaaactccctttgcttattttttattttttatttccataggtttttggggaacaggtggtgtttggttacatgagtaagttctttagtggtgattgagattttggtgcacccatcacccaaacagtataaaatgtacccarttttttaaatgcatatggggaaatgtttactttgaatctttctcctcacaataattaatctgatgtagttatgggctatgtgcccagaagtgctcaggaaagactgaagtgatgatgcagatatgcacacctgcaagctttgctttacagtttttcatgggacactagtttagcccctgttcttcggctttctaaagcactgagtgagacctgtactgtgattttctatctagtcttaaaagagaaagaggactatacattaactatatgttacrccaagtaagttaagacttcaaataaagaaaaattatgtttctaccaccacagctaaaataatcagatttccagattttaaatatattaaagtttatgcactttgcaggctttatctgcaagatggtggtagagtggtagaaactgttatacctaagagcatattctggccctgccaaaatattagatatattattttgacaaacccctttgatgttctgtgcttaagttcagtcatttttatagagaaagctaaccagtaaagtagatatggaaagtctttgagtttgtgctgacttgaataaacctggaatcatgtatccatgtcaactaagaattatataaaatgtttctcttcaaggctcataccaatcagaatagttaacttgagaattaattgcttccaactaacatgcatttattataaattatccaaaatgaaggatttttatattataaatattctgttataaatttataaagaatatgaaatcttttaaaatgtctaagttaaactttatagataatgaaatggaattgtgatagaagttatatttatacagatcttacatgttaactctgtgaaacaaagggaaaaattcaagtttggtctttgatgaccaaagtagtatgaaattatttctcaaagtttagcaaaawcatgcatagattaaaaattaaaacccaaggaggagactgcaaaggaaaataatgaaaagacactcactcaaatgccagattctaatctaggtcctatatggcagagaaaaaaaagraatttcttatatagattgtattttaatagtgagagacaaaaattcaactgataagaacagatactacacttgatcttagccaaaaggctgagaagcaaaaatgtaataattaaatttataatatgttaaaagctgataatactatggtgaaaaatcaaggcaggtgcaggagagtgtgtgtaggtatttaattttcaggtaggattgtcaccaaaagctctctcagtatttctcataaacttgagaagtaccttcttttttataaaaaaaaaaaaaaaaagacaaaccctaaaatttaaaaaaagactctagtcctcaaagagttctatgtactgtatgattaaactttaatgtaaaaatttttaaatagcaaattctagtgagaacaaagacacagagaaagaggaatagaaataaagatcataaaggaagaagaggccaagtcaagtataaaaagtaaaataaagaattaatagacccacttttatatttttcatctcttgagacagcaatttaagtgagccagggtctatagtaataatagccacagcagctagtaatttgagtacttttcccagtgctacatarggtgttaagcactcagtaatagattgcttcagttaatctctacacccaccctctgatgtgttacctccatttacagatgagagactgagcctccaggaagtaagtaacttactcagagacacacagttagcaattggtaggactggaattagaatgcagttgttagaccctaaagctcatggagatactcaccatattttagtgttttagaatgctgtctcctatccctgtctttctgcctgaaatggctcagataatgctttcttactgcttatgattgtctttatttttcagagacgtccccgtttccaattatgtttttatttagctatattgcacttgactgcattgaaggctgttcccagagtaagtttgtttgggggaaggtgtttatagcctgaatcaaaattattttgagtttaaaagcacaattttttttaaaaaaagtgttgagtctgcagggtgtaaactcattttgataataaaagatgtggttaaaaaggtgaataaaaatctgttatttttttctttttcagttttaaataattgccatcgcttcatcagataattgaatttacaagttctttggataatcctaaaggcacagacagacagcagcagttttagggagaggttagtgcagaagtgtgagcacatttttctatttttcttccttctcaaattattgagaaacagtgacattttttagtttaagttatataatcttctaggatacagaaaagtttctaagtaggttagtcagaagtattccgtaaagtatttagaataaatgtcctatttacatagagaaataggtagtactcaaaattttgtattaccatttgatttgctatttactgatgtgtgtcattaagcatgcttaaaaataaactaataatttgcatgaaaatacatttcagaaagcatagtaatccaataattaacctggtagatagtgacatttgagcccctcatcctttgagcttgtcttattgctattttgcattgtacagtttctaaaaayrtatggccgaagaagcatacttgcagggattggagtttattttgtagtgtaaaaccagaaaccttttgttgaagaaatgagcacatcctagactataatagaaatatgcttctgttttgcacttaattaaaatgtacggttgtcatttaaacttttaacgaagacagtgttcacacatttgaatgcatatttagcttatgcatgaagatcttgcttttttcaaggtcattaaaattttaaggtaatctaataacaacaaatatatatatatacacatatatatatacacacacacatatatgtataaagaaaaaagttgcatttggcttttttatattttaaaatttgctttgattacattcgctagtaagttctctgtttttttgtttgtttgtttttgagacggagtcttgctctgtcacccaggctggagtgtagtggtgcaatcctggctcactgcaagctccacctcccaggttcacgccattctcctgcctcagcctcccaagtagctgggactacaggtgcccgccaccacacctggctaattttttgtatttttagtagagacagggtttcacagtgttagccaggatggtctcgatctcctgacctcgtgatctgcccgcctcggcctcccaaagtgctggaattacaggcgtgagccactgcgcccgggcaagttctctgtttaattccacattactttcttatraattttattttagaaatattataatattgggggatttttaaaagctaaagtcagggagattaaaaaaaaaactaactggatattccattgaaagaaatataatcataaaggtcacatggccataaatagttttgaaaagtaattaaaatatcagaactctcatttttttttgacttatgttttaagttcaggagtacaagtgcaggtttgtcatataggtaaacttgtgtcatgggggttcattgtacagattatttcatcaccaacatattaagcctagtacccattagttgtttttcctgatcctcttccctcctcccaccctccaccctctggtaggccccagagtgtgtcgttcctctttatgcatccatgtgttctccttatttagctctgcttaagtgagaacatgcagtatttggttttccgtttctgtgttagtttgctaaggataatggcctccagctccattcatgtccctgcaaagaacatgatctcatgctttttaatagctgcatagcattccatggtgtatgtgtaccacattttctttatctagtctgtcattggtggacatttaggtttattacctgatttttccattgtgaatagtgctgcagtgaacatgtgcctgcatgtgtctttataatagactgaattattttcctttgagtatgtaccctgtaacgagattgctaggttaaatcgtatttctgtctttaggtctttgagtaatcaccacactgtcttccacaatgttcaaactaatttattggtaggaatatatctttcctactaatggtgtttaagtgttccttcttctccacaatctcrccagcatctgttattttttgactttttaataatagcccttctgcctggtgtgagatggtgtctctttgtagttttgcattcctctagggatcagtgatgttgagctttatttcgtatgattgttggctgcttgtatatcttcttttgaaaagtgtctgttcatgtcctttgcctacttttttgttggtgtgtttgtttttttccttgtaaatttgagttccttatagatgctgaatattagaactttgtcagatgcatagtttgcaaaaattgtctctcattctgtaggttgtccatttaccctgttgataatttctttttctgtgcaaaatctccctagtttaattagatcccatctgtcagtttttgcttttagtgtcttcgtcatgaaatctttgccctcgcctgtgtcctgaatggtattgcctagggtgtctttcagggtttttatagttttggctttagatttaagtctttaatccatcttgagttaatttttgtatatggtgtaagggagggtccagtttcagtcttctacaaatggctagctagcagaactgtcatttttaatgatgactgcttaagtttaatgtgtactctagatcacagaagtaaagatagaattacctaaataagatacacaaatacacacacacatagacacacaccccccgaccacgacacccctccaccacacactaacagacctgcacattatctatgtagtaatatatcacaagtctttgccactcctgcatttggaaagagactagagaaagaaactgaaagttgtagttcatagccttttctgtgattcaggacaataaagtaggcataatttggctatgtttataaaataaatggacagatctatttgagatgctagatagctataaccttaggttttctggagtacaaccagcaataaataaaattcaatccatgtaacataaaaagggaaggattgtgttggaacattgtggcaagccctgtgctgtatagatctcttcagactactaaaatcatgaaactctccttgcttttcagcaactgttcttaccctaccagacatttgtttacatttccattaattaaaacattccttagaattttgaacctgatattttctgccttcggtataaattctctttcctggggtcacttagctcctgggcattattttaatcatggtaatatgaatggattgattaaagaattaratataaaataacatgctaaattcatattccaaaaacctacattatttcacattttagcctgtcttcagttggaatgtatcttacaatattgatgtggtagtgatattttttcactttattagagatatataaaataattcatcttgaaatgggtgatgtcttagatttgaagatacattgtaacttacccgctctgccatcgttatagtcgtctagtcactggagaactcttctttttgtcactcaatttgaaacctcaagggttgtaccttacaataaatttccttagcttcatcagtgggagtgaagtgagtttagtgcagaatgatataaatgatagtacttcttacatcaaaatccttatactttgaacagacactttatcaagtgcctgagcaaacacagcagcttttgaagtatttgaagagccattgaatttaagagtcttcatgccttcactgttctttaatcttattagtacaggcctccttcagaacactggctcttccttggttcaaatttaaggacatggattataaaataatggctgaaaacttatctacttcaacctgttgatagatatatcaaatacttaggaagctcttgaatttaaaataagaaatcataatattttaaaatgctatccaaactgatagggacctatttgatctcctttaaaaaaaaaaactattaaaaaattttcattcttttcccactgtatttttttccagttgaacaaggtaaattttatgatccagtgttttgtatttactaataaaatgatcaaatggaccaaataagaaatggactagaacaagtatagtaaatctcagatattcagacctcaacattacttttaggaatggcaatcttgtatatctaattatgtcagtaatttagatggatatcattttatctgatttttctatttttattcttctcttgtcattttcattctgtcctctttatgcttggaatgtgatatgttttggatatttgtccccttaagatctcatgttgaaatgtgattcccagtgttggaggtggggcctggtagaggtgtttgggacacgagggaggattcttcatgaatggcttgatgccctccccatggtaacaagtgacttctcactcacatgagagctggttgcttaaaggagcttcactcctcctccttgctctctcttgctcccttgcttgccatgtgacattcctggaccccttctccttctgccatgagtgtaagcttcttaaggccctcaccaaaagcagatgccagcaccatgcttcctatatgtatggtctgcagaactgtgagccaaaataaacctctttcctttatgaattatctcaaatataacaatatgaagaatttcaacctgagaaataaacaagaaactgtatatgaaaacactgccgtattcttggcataaaattggtgccgcatatagagagtaaagtaatcagatctacatttgacttacgcgcacctcccaactctaccacttaacaagctgtctgcctttgggcacaactgctcttcccttccacttctgattccctaattcagtctcagtttccttacttttgaatactgtcacttgtacttctgaaactcagtctatgtctctcctttcccacagtcagagattagccatacttaactatccttggactgttgttagactcctgactgcttttcccgacttagtctttccgccgtctgttttatactgtttacaacctccgggttaattttttttttattgtgatacactttctcaagaattttaaacactatcacacttaactaataaaataagtcttaagaccctaacccagccttcaaaagtcttcatatatggctcgtccctcatatttttcttccttgactctccctctcattgcatattgctttttgctctatttacgcatgttcatatgcatgcctaatctccctttacaggctgtgagtcacatgtacatgaagaccatgtcttccttatttttgtttcttgcacaatatcttgtacattgtatgtacttagtaaatgaatgggggagtaaagataatttattgtactttcctcaattataaaaaacaatatatgtaatttggcttttcttggtaagtcagtrttgtcattctgaatatcagtttcaaagttttattgggaaattgggaacctattaggagaaggtcctctgctaggcatagggaggtagctatggataacagatgaccttttaaggtgtcctgctaaatttattttgtgtgctatrtattggaaaccatataacgaaggtagtttamaataagtatacattggctttgagtcatattttcagagataaattttcacagaaaaaggatgatgtaggaattgtggtgctgtgtgggtcccatatyatgtatgtacatatgtgtgcatctgtgtgtatgtgtgtgcacatgagagagagtgagggagtacccaagtgagagaatgtgtaaaacaaacaaatcagttgctcaaataacctgcttgaaaaggcttgttctaattctaagcagtattcctaaaacatgtagtttcctgatacttgaataatatatgatagcaattcacaattataaagctctttcacacgcattacctttcacttagtgtttaaatttgtagaaatttctggattttaaaggccacattttctaaaggaagctattgtgttccctgggcaatgtagacacagaactgggtgattgcacaattggacacagaaaatttttttctttaaattataggccagagaaacatgtctaaattgatgttttgaaactttctctatggctttcataagcttttcctttatggctaccaattatataaagtaagtagattctaacactttcaatatgatgatctctttcagtgtcaaagagaaatgaatccttgtatagcaattgttcttttactgtcctttgattgagaaaagtatacacaaaaactattaaattttgtgactttaaaattgcattttttggtgtgtgaagctcagtctgtactttattgtgggaaaagcatgtaaaatgatggacacatgatttttattttactataacattgaaaataacgattaaatattatttaattctgtgtcagagaaataattttgttgagaacattctcctttattaagagaaaaaaaaaaaaaaagcattccaggcatggtagctcattaatcccagcactttaagaggccgaggtgggcagattgcttgggctcaagagttcgagaccagcctgggcaacatggtgaaaccccatctctacgaaaaatataaaaatcagtctggtggcatgtgtctgtgtctgtgatctcaactacttgagaggctgaggtgggacaaattgcttgagcccagggaggcagaggtttcagtgaggcaagatcgtgccactacactgcagcctgggtgacagccagaccctgtcttaaaaaaaaaaaaaaaaaaaaaaaaaaaaaagtgcccctaagtaaatgagggaattcttacttttagttttgcaaccttaaataattttcctataacattttaaaaattgtaattcaggtgactaaaatgaaagtgttcataggaggaaataatcatctctactattagtgagaagttgaatttggttaggaacgggttcagaacatgctaccccaaaatatgccactttggcttattgattattttgagctgaagctgtttgagaaacaagagatggagaaagagctctttgatcccctcctttctacctaaaagcaaatcataaaattgcccgtgaaaaagttgtctttcctgtgccgggaataggaggacattctcgtcaccagacattgggaagccatgccgaaacagacctgtacaaacaaacctactaaaataacccctgtcttccatcagtttcccccatatatttcctcgttgttttcccacaatttactgcccccggcacaagctcttgtgtcttgtcacattcccataattgatcattcgttgygtaaaaggcacattaaatgtttgggtctaatggtttctttccttttttctttttaacttttaggttcagggggtacatgtgcaggtttgttactgggcaaactgcctgttgttggggtttggtgcacagatttttttgtcacccaggtaataagcatagtacctgatgggtagtttttccatactcaccctcccccagccttctaccctcaagtaggccctggtgtgtgttgaattaacgcagggacggaaaaccaaatacytcatgttctcacttacaagtgtgagctaaacattgagtaacatggacacaaagaagggaacaatataatctgcattttaatagtaaaaacatgtacgttctttgaaatacagtgtcaaacgtgtataacaacatagtttagtctttagacaatgcctaatgcatatatagattcccaaccccttgtaataacataactacttactcagtgagaacttacaataacatgactaccagtcagtgattcttaacacctaggttgggaaccattgcttttgatgatatgcttgccttacttagccactgctatcaaaagcctacgttgtgaaccagtaattcattaattggtattttaattcagttgttttttaaagtattctagaacattactctctaaactgtactgttttagtttttggaagatttgtcaaagtattttgaagaacaaaagctaaacttctatgttaatagttttttttaaattccacaatatttcattatttgccatgtctttgattatttattttcattatccatatttcagcattaaatatattggtaggctgaaatcattttcagctatattgagtgactttaaatgtccctgtgcctggtagtcatcatttgcatctcagtctttctctctttctcaactcagtaatattctgattatcagtttcagtttgaattagagaaggctgacctggattgactaaaatggaggcaacactactagaaaaagtttctgtagcgtgtccatcttcatctctgacttagacaaagattttcaagggttgaaaatgatggctcattgttccttgctcacagtttctattaatgtgataatgtttgcagtaatgataatatactaacatttctgagattaatgatatattttccaggaaatcaaaacaaaaagcacttaaattatctgtatttctacttaggctagaagaaacaagatttctaaggtaccaatgcatatttaattatagatttttgtatcaagtaccatttctagacattttgagcctaataaatttgaacataatgatagcttttattaattttgctgtaatatgctaatactatctaacaacttattgtgaaaaatcagatgttcagtacagatgcaatgatgcattycttttttgaatattttttatctgaaattgattcaattcacagatgcaaaatccacagatatggaggactgactgtatgtatttagtaatatatctagcagacacatggagatagtataactattagtaaatatttaaaagatgactacatgttgaacttattctttatggcttgtcttggtagaaataatataatctcaaggagcaaaatttctattcaatatggagaagaatttataacaagtggaatgggttgcttgaagagaaaagtagattaggtatgtttcgtcccaggctgggtgatcacttgtgagtcgtgatggaagtataacagggatctcatgagtgtgtgcagtagatagcctataaagcccctttcagacataaaactataaaagaagaaatgagttcttagcacaaattatgatttaacactgctcaaaaactcacttctaaattgctctctcagcacgtattttacaatgtctcattcaactcctcaactgttgtgaattccttaagagctgtacattcaaaattgtgctagattcagatgcagcggaatatggagggcatcagagactggaccacagcactgactttttttctgaggcttttgaacataatgggcgtccctattctcttttggtaagtaagtttctcaacatatttcctgctattttaatttactcttttatyatagtaatgtttttgttcaaataaacaactcttcaaataagcaacatggaaaaaaagcatgaaggaaaggggttagggagaggggactacgcttggccagatgtaatgtgtgtaaaaattgggttttggaaaaactaatagtaaaggatatttaggggacaattggcaaaaattaaatattaataggattcaaaactgtttctcaagaaatgagcagaaggcagttttttatttttctttcaaytatgaacatttctattctttatgcaacatttcactttccttctgttcttgttttctccataacattttatattaagcagatttctacattattgactagcagatgaagtttaatttaaaacaccttaaaggagtcaatgaaaaatgtatctttcttttctttcatgtagtaaattgaaggctgaattcattctagttataaaattctctggattttttatattactgaatgaagcattatatgacataactaatttttgcattgtggtgttcacacaaatagaatgttagaatgttgctttaaactactatgtttaaattctttaaaatatgtagaatttagtaagtttctagattcagaggaattcattatttaatttatggccatatagtaggttcaaaaccacatctaccattcctaattctaggacgtacctaacaaatacatgactttaccatagctgttaaagttcttatttcattaaattctctcacttttcaaaggtttagataggagtcaggcatgaggatctctgtggtacccctaggtcttccatctttctactgttttcccacttctcagagtgatgccagcactccactttgtaagctgccatattatatataaaagtgatatgccaaagatcatagcataaaatcattgaaaagagcagggattacaaagagtgagttgctggattatgggttgtgaggaaagtgcagtggaaagtcctatgagaattaggtgttgccctaaatgtatgtgtgtgcatatgggtgtatgttgatgatgacactgatacagctttagatatatttggagaaagatatatatttttaagagwgagggctcaagggtgctatcacattcttaaaggaattattactgtagtctgtgagaacattcaattttgacacgtaaaataagtttgataaaaatagttttggaagtgaatacgaatattaccataaagttctgaaataatcaaaagagttagatgcccttaggggttaggaaagatgattcagctcacaaaggggagtcattgggaaggagcaactgattgcaagcaaactgaactttcactgatggaactagactgaaaggacttggaaagactcagacagcaaaattcttacatagccagcttttctaaatgtccgtgtaccccaacagggttctgttatgaagaacctgaaggtatagtgaaaagatcacaaaacgccatggcacaggacctggaatcctgacccttgtctgccatttactcactgagaaattgrttaatttaactttttttgcactgcagtttcccccacctgtaaaatgaagatgattcatattatcttccctacagcaagagattcttaggaagcagaaactctttaacatgcccaagctttttggaaactgtaaaatgctattgcacatgtattttaaagttgtacttgtcatggagaggcaattattgttcagtcgtttaaacatgtcaatatactaagtgtttccaggacacacaattaagaataccttctcccagctttggggaratgatcttcttaggcgacggctcagactcttttgaggtgggcagaaaatatcttggcatcctttcaattttgtgagagtaaagatctgctggcataattaaaacaagccaaccaacaagtggcagcaacatcaggagattacttttcaatcactaatcgaattgatctcaccagtgtggaaaatgcagttgtaaattatcaggtagaataaagaatgtctcataagtatcagtaatacatagaggaggacagcactgcaaggacatgggaaacagaaaagagctgaatgctgcctgcaacagaattgtaatccaacacagccgtgagataagggctagctctctcttcccagcagcaacatcttgttttggatgactacagtgcttcaggaattactcgtttaaatacacctttaggctccagatgataagatcactcgttttaatgtgagattaagggagcccacacagacgagtaaaatacagaaaatctagacaaacgggttttctttttacctaagttattcagcaaagagccagaggaagaaaaatcacattaacaaatgtacctattctaataatgcttcattataagagaactccttattaaactgagtcatatgtgctgggatccagtggagttgcttgaacatgatcataagtgctgtaggtcttataccacttccagtgagatcactcatacctcccatactygcagactaaaaggaggaaggaagaacaaaacgcaacttttccttcttccatgaaatttttgcccatcataactagtacacagcatttgctaaagcttaatttgcaagcttaataatccaaaggatctgctgaataagtgtcaaatctgttttcaaagatagcaacaaacagcccgaaggaatcttaaaatagccatacatgctgcagcatcagcaggtaccgttctagcgttgtctctgtgtgctccctcagttgaaactgtgaagctggggataactgcatgtataccgccattgaaatgtatttgctaaggtcagagtatgtcacaaatgtccaaaagcgatagggcagagctctgccagtctgctttactggcagttattggaaactccattttagcataatcatttctctatattttgattcctgataccggaacttaatatgttaacctatatgttaatcagtgcactggaggcaggggacttcctttctctcctctgattcataaaaccaaattccatagcacaaatgagagataagagattattgagccttaaatgaattagatttctttacggtaactgaatgatgatgctgaaaatgagaataaagcagtaggtttagcactaattactttggcaattaggtttcttatcaataagaagtagatgtatttactctcattctaaatttggaggttcaaaagtagacttgatttaaatacaggatttggcatagatgtatcacttttattgcccctcagttgtaagttttaatacagcttaacaattggaaaatatcttctgctctattcaaaattatgaaaatagttttttagaagaaagaaaatcttgatttttagtttacttttttaatgtatacaagttagatgagctaatatacatttctgtacagaaatactagagtcacttttctcctaaccccaatgcaaaataatgagaattagaatacaagaataaaatttattttttcttagaaaagtattttatgaactaaagcatgtatgtgaaaactaaaattaatttatatcatctttatatttttcaaaaaactgtgatttttattataaaaaagtgtttatgtagactatgaaagaatctgatgactttttcattgaatgatgtttgtttgttttttgtgagacggagtctcactctgttgcccaggctggagtgcagtggcgtgatcttgactcactgcaacctctgcctcccaggttcaagcagttttcctgcctcagcctcccgaatagctgggattacagccgcacaccaccasgcccagctaatttttgtatttttagtagagacgaggtttcatcatgttggccaggctggtctcaaactcctgacctcaggtgatccacctgcctcggcctcccaaagtactgggattacaggcgtgagccactatgcccgacccactgaatgatgttttcattctaccagaattatatgtgtatgtgctatttctaaacttaacaatttctaagggaattttttaaattgccctttaaagtattaaatattttttcattttaaasttttctttttttaaatgtttgacactgtgttttcaaaaactgtgtaattaaattttgcaagtcaattattagtcctagaggaaaatacagtcctagaggaaaataacattttgcctgaatgacataaaatagagcattgtgtgagcagttattgtcttagccacactcatggttagtgagtcaattaagtcattaaagttgtcaaaataactgagtagattagcatgcatttgactctcttcataaatgaattggattgtactgtgctattctgactctttgtgaagagcagactattaatatagctagaaaaaaatgaaactcatggctgtatactacgttgtctcatgttcttaaggcgattctaggtataaaatgtttagggcttacaggctaataaatgagcatatgagatatgtttatcagcatgcatattatcatgaatgataagtggcttctatatacaggtacatcaatatactttttatatttaaatatacttaaatgattgtgtttaaatctacttaaatgtgttcatgtttcttttctcttgccacattaatcaaaactattttataaattaaaatgataaaatgagaattacagagccaatacttaggctaaattttaggaaccccaaattgttcatgtctgtaattgtctcatcataagggttagctctgattatcttacgttctttagtataatcagtagtagttttctaaccactaagaaaattgatttacatactcagaagaaaactcaaaattccataaatagccatagttaagaaaaatcactggcttagggaaattcttccatgttgcctataccacaaaggctctggagcaatataaacacattctggtaattaacactgcagtgaaatatatgtatattattacaaagtatttctgttaatgatactgtacaattgtgaaccaaagggttttttttttagcatattgcattaagaggtctctaagtatgatggaactgtcattataaacctccttacataaaaagaccagcatcagttagtgagtgttcttggagcattttttaaccattaagtgccacaatgggaatatattgcagtgcatatgttacaaacctggaactttgttatggcatcctttaaaaaaaaaaaccctctcggatgggtgtggtggctcacacctgtaatcccagcctgccgaggcaggcagaacagctgaggtcgggagttcgagaccagccttaccaacatggagaaaccccgtgtctactaaaaacacacaaaaaattagccgggtgtggtggcgcatccctgtaatcccagctactcgggaggctgaggcaggagaatcacttgaacctgggaggcagaggctgcggtgagccaagattgtgccattgaactccagcctgggtaacaagagcgaaactccttctaaaaagaaaaaaaaaaaaaaatttagacaagctaaatttagacaagctaaaatgccaaaacatcaaagagtaagactggttctaaattatcattatgtaattattattatatttcattaatgaaataatgaggttatgaatgaaacagtagatatcacaattgcataggatccaaatctgagatatgtcactataacacgcactaacagagacctgtcattatttatcctaggcctgtctaatgtgtttcattgcaactttcccaggaaccttggacttatcagggtctttttacctgcattgtaggacaatactctataagagaaatgttttcaatgtagagggaactgaaattctcttgtccagtttctggttctactgaaatgtttagattggttttcacttttagattgctcatggcagaacaattcagaaccattcaaattgtaaccttctgtcccactgattagttaaatccagttactgtgatccccaaaatgaaatatgtagactatgactagctgcggtggttcacgcctgtaatctcagcaatatgggaggccaaggcaggcagatcacgaggtcaagagattgagaccatcctggccaacatgcagaaacctcatctctactaaaaatacaaaatttagctgagtgtggtgttgcatgcctgtaataccagctactcaggaggctgagacaggagaatggcttgaacctgggaggcggagattgcagtgagctgagatcacaccactgcactccagcctggtgacatagcaagactccatgtaaaaaaaaaaagaaagaaagaaaaggaaggaaggaaggaaaggaaraaagggagaaagggagaaagggagaaagggagaatgggagaaggggaaggaagaaagaaaaagaaagaaaggaaggaaggaagagaaaaggaaagaaagaaagaaagatgtagactagacatcctaataagtacatgggaaactcctttagaagggtaggtcactttctcaatttgtacatgttttgctaagatgtagggagggaatgggttgaatcaggctgttttttttttctccttctttgctttggtttgtgttcattttgtctgtagcttgattatggaaatgtgccctcctttggactgggtctgtctggatctttggtaatagtcctgctttattcgtggataactccagcttccttttattgaatcagtctcgtaacatcttacgtatgacaaagagaaaacattgcatggaaaggattgcattagcagtgaaattctgatgtggtatgatagttatgagatattaaatacaatgtgtaaactctagggaaacagtttgtagcactgaartacatggttttctcacacttagtgactacatggatgtaatatttatctttttggaaatactgtattgcaaaacagaacatgagacattgagttacacagcgactgctggcatttgttaatcttttgcagatgactttcatttcctaaatcactattactttgaattgaagattagaaaaactattctctagccattaaatccagaatataagtgccaccattttaaaactgctttaacttttgatgttaaaaactaaccagctgtatcaatatgtctgatttttttaagagtagtatgggttctttattgtggaaccttaagagaaaacatttgtagagttgagatgcattggacatacaagtctcattcagtgaaaatcaactgttctatttgtttgagttttttcctaaagtcatgtttgctttgcaccttcattctggttctaacctctgaaagctttttttttttaaaccatcaggcaagctttcatttagagataaagtgactgaaartagtaaaatatcagcaaagtcagaagtgaagacagattgtcacaatgacaaccatctacaatattatttttactgtttgctttgttaatacttagataagttgtttgaactagcatataaataagcattaagcagttcaaatcacttctcaattttataaaaaaattcagatatattagagaatatcttgttaaatatgcacctattgatccactattattcctttgttcattgttcatttttttaattcagtcatcaacatctaccttgttcagtggcaccaactgagrgttagaaataaaacgtatgacttttgcctttgtaaagctcatagtctaatgagggaaacagatggtaaacctgaaaaatcattcacaaattgtgttaagtgttcagaaagaaacgaaaaagctgccatgattggaaaagaagaacttatcatatctagggttgtcaaggaaagcctctccacatagctgggatttttccaagagataaggaaccagcaaggcaaagagtgtttacagcagaaggcacatcataggcaaagatccaacaaaaggggagtgtttgttgtgtccaaggaactgaaaggctcctgcggctggagtgtagtgggtgaggatgcaagcaaggagctgagctgggataccagatgtaggcagggaggagcgagtcagggctktgcatgccatggagagaatctgaatcctagtttaagtgcagtggcaagcttattcattggtttaaattgagagttaggattccttgtattacatttcagtttttgttcttgaaaggaaaaaaaaaaacaagattaaaaataaaagtgtcttgatggaaaaccagtgccttgtatattgcttttcttcatctaaatgaagtagtaacattgcaaactgtggggcagccttccttcaccacctaatacagcctcaacatggcagtaacagggccattcacgtcattcttgtgtaaggagcattggttttcattaagtcgtatggcgccctctagtggtggttgctttatggtagtcatgttgctgccagaactgttggaactgtgaaattgagccttctaagagcttgtaaaattgtaaargtaactgtaactttaggcagatgtgagactgcgtcatgcctatgtttctttgacataatgacaggccgtttggtactttcttcaattgcactgacataattgttttgacgtaggtgtacattccaagcagagtggccctcatccttcagaatgtggatctgccgaattgaagaggcctgatttcagctccaccagatgcagatttgtgttttgttttcttgttatcactgtcacacagcttataacatgtatgcttttcagaatacagttgtctagccaagccatcaagtgtctgaaattcaatattggtttatgcaaatacagcaaacttdtatttaagtagatrggagaatatgtttaaaatattaggaatcctagaccatattttcaagtcatcttagcagctaggattctcaaatggaagtgttatatataatatgttaaaaacattttgctttcctggctaattatttgatccttttaaattcaaatttgaatcatttgtcatgtatgattatttctgttaaatgtacacagtatttaagatggatatttggtggctctatttgttctgatatcttttggtctaaattatgaggtaccaagattgtttctttgtttctttttttcaaattgtgtttagaaatactgtaataaatatgcagtagtgatataaagaattatatccaaggtaatataaaagccattacgtatgaactcatccgtgtctcattttgtgttttwttttgtgatctcttgtccactaagtatcttgttaaatgccagtatctcagtctttctgaagccctgaaatggtaattgtagcatttcagaaaatgtctttcatttcaatcaataaaaagcttttgtaaaattgcctttgctaatgtttattttgctatactattatagggcttgattataaatgaatattattgtattcttataccttctaataccttcttaactctaataccttctccacatacattcacatctacatgatggactaggaagcatggagattaatattttttttaggcacaattttgtaacttgaaatcacactaaccaattttgatatctaagctactccttcgttgtaaacctgaacacttttagaagctaaactaagtatctccactcagtagaatacttcttcatgaatttgccccttggttaattaaataccaggtcacaggtctaagatcattgattcataactgagagattataatgcacttatgggacataaagtatctgttacttttttaaaaagaacaaatttttccctaatattaatactgactgcttgttttttgtttttagcctgattatttgcagttaattagaaatgagttctttcattaaaaactcagtaggagagataagcaatagaaacatttttacagccaagcctgtactgtatattaaacatcatccttaaactgttttaaaataaagccatgagcatctaagtgtgaaaggtgttatttactttaacttctaaacagaatagtagtttgatttcctgaaagaatcagcagtgccagctgataatgatacatgctggggaaaattactgaaagtcatctgtaatggttttcccattgcatggacattattaatatcttagcactcacatggtctgtgtactgtgagagttattgattaaaacacaacgcagaatcatgaagcatgatatttcatgttgtagtttatagttccttaattttgcatgtgttctatatgaagagatatactgtttattaggtatagtttttaaattataataaattatttaacacctggaacacatttacttttcattttgacctctggcaaagtgaggaagaacggactaattatatgccatattttcattatattgattgattttgctaataggttctttagatttcacagtctaaagttaggatttaacaatgtaatgtaagttaattgcccctgtcaagtgcccttctcccccacccagaagagcaataaatgcatgttgctaggtaggaattacaaaaacccatacaaacaaataaaatattaagagtccaaaatggaaagcagttgggttatatcacagaatagaggacctttatggaacattctaatattctaatattttttactgtaggacttttcatttatgtatcagtaacattctcattgttatgtcatcttctaggaagttctttattggctaaatgttttcaataatcaaaacagagagtatggccattttcacgatattgattcttcctacccatgagcatggaatgttcttccatttctttgtatcctcttttatttcattgagcagtggcttgtagttctccttgaagaggttctccttgaagaggtccttcacatcccttgtaagttggattcctaggtattttattctctttgaagcaattgtgaatgggagttcacaaggtaatttatagattcaatgccatccccatcaagctaccaatgactttcttcacagaattggaaaaaactactttaaagttcatatggaaccaaaaaagagcccgcatcgccaagtcaatcctaagccaaaagaacaaagctggaggcatcatgctacctgacttcaaactatactacaaggctacagtaaccaaaacagcatggtactggtaccaaaacagagatatagatcaatggaacagaacagagccctcagaaataatgctgcatatctacaactatctgatctttgacaaacctgagaaaaacaagcaatggggaaaggattccctatttaataaatggtgctgggaaaactggctagccatatgtagaaagctgaaactggatcccttccttacaccttatacaaaaattaattcaagatggattaaagacttaaacgttagacctaaaaccataaaagccctagaagaaaacctaggcattaccattcaggacataggcatgggcaaggacttcttgtctaaaacaccaaaagcaatggcaacaaaagccaaaattgacaaatgggatctaatttaaccaaagagcttctgcacagcaaaagaaactgccatcagagtgaacaggcaacctacaaaatgggagaaatttttgcaacctactcatctgacaaagggctaatatccagaatttacaatgaactcaaacaaatttacaagaaaaaaacaaccccatcaaaaagtgggcaaagaacatgaacagacacttctcaaaagaagacatttatgcagccaaaaaaacacatgaaaaaatgctcaccatcactggccatcagagaaatgcaaatcaaaaccacaatgagataccatctcacaccagttagaagggcaatcattaaaaaggaaacaacaggtgctggagaggatgtggagaaataggaacacttttacactgttggtgggactgtaactagttcaaccattgtgaaagtcagtgtggtgattcctcagggatttagaactagaaataccatttgacccagccatcccrttactgggtatatacccaaaggactataaatcatgctgctataaagacatatgcacacgtatgtttattgcagcactattcacaatagcaaagacttggaaccaacccaaatgtccaacaatgatagactggattaagaaaatgtggcacatatacaccatggaatactatgcagccataaaagatgagttcatgtcctttgtagggacatggatgaaattggaaatcatcattctaagtaaactattgcaaggacaaaaaaccaaacactgcatgttccactcataggtgggaattcaacagtgagaacacatggacacaggaaggggaacatcacactctggggactgttgtggggtggggggaggggggagggatagcattaggagatatacctaatgctaaatgatgagttaatgggtgcagcacaccagcatggcacatgtatacatatgtaactaacctgcacattgtgcacatgtaccctaaaacttaaagtataataataataaaataaaataaaataaaaagagttgcaataatcaagagaattgcaaaattttactcttgtaatgtgccttacaatgttttttctctgacgtgtttattaccaacatcagaaatgaatgacctgtctttgttgactttttaaaaataaatattttgctgtttcaattttttatgttctagaaaacatgagtacagatttcttgctatcattttctaatattagcaaacgagttctagtagttgccctattatgcataataggatttacacctaatgctagtgatgcataaggttttcatttaataaatagcctactcagaaaataccatagctcataatagccaaaaactgaattgtaaacatttctcctagaatgtttcccactttataccacttgaactctgagggtcaacttttctcatattctcttttctataaatgtaatgtttctcactttgccctgttcttagctgacgtgtgtatctctaacctaaaatgagggagttagccaccatgttcctcaagttcaaaaactaaccagtgataataaattgacttttcttgtaacagctgtaaaagaatgcaagtttttttttctttctctgactgaagcactccccttagcaataccaattcaacatttgtcacccatcagggttatagccattgctatggggatcatacaggaggttgtctgaataagaagcctgttcttcaaataatacagaagagagtggaagcgagtgcagacagatcgtgggggaagcgatgaaaggccatgtgtttccctctcgcattcagctttcagtttctggaaaagtatcttttctgtctctggtcgtgaagccattgaatctggtgatgaaagcaatgtaaaattgcttccttattgcttttcctatgtagaatgagctggaacagacagacctgatagagtccaaaacagtgaatcagctttctggctggccttgtgcctctcagactatttctttttactattttgagtcatgccctaaacttgaggtcttcagagtagtgagtttcatttccctctctattccttacaaggggacaagcactgagctaggtagaatattctgatgaaagaaaatagcatagcaatgtcatgtcctttaagcagtagagttcatttatcattcacaatgtgttagaatagaaatgtagataaattttctaactaaagccagcctttaggggggaaaaaaatcaaatgaactccctgctaatttttctgccctattatcttattaatggtgatttgtagagaatttcagagaaacgttcatacttcagggcagaatttcttaattggtagtgtgaggaattataatacagtagctgtaagtgtttttgtctccataaagtgttacatctggattttaactcttggcaaaaactgtgcagagaaagcaatgtttatgtacattaaaaaaatgtattttgtgttagatatgcttatgctaacaacatgtctttcagaagcttacttatgacttacagtttttcttgtcatttctgctggaccagagagaggtgtttggcccttatatatgctgtgtaaactgttttacccagaaacctgaactgtattttaaaagaatagtatgatatagtggtcaggagaggtgggctcaagttgcagctcttcatgctcagtgcctcattgcttatgtttcctcttggaacatacggatgtcccagtgaattcctttcccctacggtcgatgtaatgcccccttagtgttcagctactccaggctttgcactaatatagcccaaccttgtgaatgacatttaacaatatctctatggtaaccaagagggcaatgtaaactgtatacaaactgaaatagccttagatcccatcatagcaaccaagtgttgaggttctctatttcgttccctcttcccctcctactcgcaacctaggtagactacaggcagaaggaataattgacagaggaagcaagaattgcaaaagagagctcataggtagaaacagtttggttcatctttttttgttatgaaagtctgtactctcaagaacacacattgttattaataaatgtttatacaactagatgttaatttcttgaagatgggggagggatatcaaccattggcctgaaatttcaacagctgtctggtagtaacagtaaggaaatacaaaacagaaaaccgacaaaaatgctatcacaccaaattactttgccacacaagaatatgaattaaatgaagtaagtgttcaaattctttatgcatacttgtctaaggtaatacaggaaatagaaagctgtaaatgtgtgaataaactcatccaacatatacatattataacatatgaatgtgtgaaaaaacacatatataatttgtaagtcaactgaaaacacacaaagttcactaattctaatatttggcttgaaccagtgaatcacttgatctctgtatgtgatacttgttctcaattttaggtatttttctggttacatacaagcatcaaacccaaacacatgattttatttggatttaaagaatgttctagatctgtgcaatgaaatgcaatacatatgtttcaaatctttaggaatttctcacctcacactatttagctatgagtcttctatttttcctttagaaaggaaggaggaggagatgaaataactttatcccttctttatttatgtccaataaggattcttttttaactgtttgtagtgtcactttccatcgactccagtaatatacatgaaaaatactgtgtgcaatgaaattgcacacacaccccaagccacgctgtcaattattgattacaactgatcatatgatattacacacataca

SEQ ID NO: 95310 - DNA, 12986 bp, Homo sapiens
attaagcaattgcttacatgtcttgacccacttactacaatttgtatctgacctccaaatccttgggcagttttacctgctgttgtccattgttattctatctcagctatctataatgagacgctatctgcaagcagctcaaaactgcctacagagtgaagaggtcttcagtgatcagtaactctgcagacaataggatttgctctttattttacatatcttagccacattatcaaatagtaaaatatatgtatatgatctagtccatagacatatgagaaaataaaatttgaaatatcaaaagataattcagaataaagaaaataggtcatatttgagatagagtactttcagaatttgcactcatttgttatgtaggacataaaaattggttaaatagaaggaggtaaataacattaatataagtggtaggttattagagtaattgttcccaatatgtcacacctccctgtcttcacatgcttgtgtagctcactcctgtgtttactccaaacttggccttatgacttgctttagtcaataagacattaacaaatatgacacaagcaaaggctcaaataggactgatgtattgtgaccagctctcttgtagcattggcaccacgtgaagaagcccaggctaaaatgtcaaagacacatatcccaaatgacatctagcactaacctccagacaaaaaggtagggtcattttgtaccatcaagcctcagttgaactgccagttgaggaaagccatatgaacgaaccaaggcaagacaagcagaagaaccaccagctgaactcagcccaaattgctggtcatgtgttaattaatggcaactaaaatcattaagttttgggactataagttgcacaacaatagattatggaggagtaaacatgtatttcaaataagttttctttcttcctcttttttaaaatttcatgtaaaaaaagtagaaggataggtagaacaagcctgatgcaggggattgatgatgtcatctaggggctttctatctttaatatcttagttttctgtttacaacatagggactgctctgccttcatctgtgtccagggaaggatggagggaaaatagctttatgtactgctcctgttctattcattgtaaacgcagaacactgtcagagatcctttccagacttctgctgtatgttattaggaaggagtgtgtcagccgggygcagcggctcccacctgtaatcccagcactttgggaggctgaggagggcggatcatgaggtcaggacatcgagaccatcctggctaacatggtgaaaccccgtctctactaaaaatacaaaaaaattagccaggcgcggtggtgggcacctgtggtcccagctactcgggaggctgaagcaggagaatggcgtgaacccgggaggcggagcttgcagtgagccgagatcgcgccactgcactccagcctgggcgacagagcgagactccatctcaaaaaataaataaataaataaataaaggagtgtgtcatctggtcacttctagctgctagggtggctgggtggggaagagaatattcagcttttttagctgctttagtaaatgtatagctgctatgttatccggtccacagtgttagataagtttcctttcttctcacattgcttttattttctcattattacttgaaaccctaaataaaagacataggatacatctgaatttatatatattcattatttaggcaacattcctttaagcctcagttttctggtttcttcatagttataaccttgagtcttcaataaagcgagtgagttaatatttacacaatatatagtagaatatctagcaccaggaaagctgagaccatatctgttttgtttacttctacgtgtccagcactgtgtagagtggttggcaaataggaggaactataaaatgaatgaatgatgacagaatgactgcatgactctctgacttaatagacaagtactagctgcctttctttcaactatattttatcatttttaggtatagaccaggtgcaatataaatacaaattatatttctgagttttcagaggttagcaaaatgcccagcacataacgtatagtcaacaagtatttgttgatgatgatgttgatgataaataaggctagcatcttatagtaattgtactgaatgattttatttttcctccaagaaaagagttaaattttaaaatagaatgaattgtatcctcctctggttgtttgatttatgtatattttagaatcagaatcttgaaaaaccttgttcaactttgaaataccaggacaaatgttcaccatgtgctgcacgaagcttaaagcatttaatataactggacctctgtagcacactgcttttctttcttaaacaacataaatttgctgagctagaccttagagaactatgatttgttgacatgaattcaacatgatcccaacctgcatagtaagaatgttttgatttctttgccaactttgattcctttgccaagttttgtggaacatgtttttggtcttggcaaactcctgcatattagctatcccattccttctaatttccagagacagacattaattattttcctttgcactcctgggagttaaacatatgaaattactagacaatgccagtaaattattttccctgagaaatattaagttgggatggattgagaatttctgaaagttggagacttggtctcagtgattcactctcagctggtgtttgtcagtttattgtttcactcagtcacaataaacataagtaagttgaactgttaaagttgtccataaagacataaaagatgtttttccatttttattcacaagaagtaccttcttgatgaaaactctaggtgaatgtggaaatctgcattgttggatttaaggagaaaaaaactgaaacactgagaacatgaactagagaaaatattaagataaaaacaaagggtactgatgccatagaggctagctgtccatctgacaaatgaagaaatgatgtgacttgtataaacaaggagctctcaattttgccacaaaattgtgttgcaaaacttgacctgttcgttgattttttaaaaagtgtattcatttatgtattcattgagttttttttttaataattcagtatatataaatgttattttacttattttttttaacttttgagtttggagatatatgtgaaggtttgttaaataggtaaacacatgtcacaagggtttgttgtacgtattatttcatcacccaagtattaagcttagtacccaacagttatcttttttctgctcttctccctgtttccactctccctgctcaagtagacccttgtgtctgttgttttgtgctttgtgttcgtaagttcttcccatttagctcccacttataagtgagaacatgtggtatttggttttctgttcctgtgttagtttgctaaggataacagcctccagctctatccrtgttcccgcaaaaggcatcacctcattcttatttatggctgcatagtattccatcgtgtatatgtaccacattttctttagtggatctgtcattggttgcatttaggttgattctatttctttgctattgtgaatagtgctgtaatgaacattcttgggcatgtgtctttattttagaatgatttatattcctctgggtatatacccagtaatggaatcgctggttgaatgctagttctgcttttagccctttgaggaatcactatagtgctttccacagtgattgaactaatttacactcctaccaacagtgtttaaatgttcccttttctccacaatcttgccagcatcagttattttttgactttttaatagtagccattctaactggagtgagatggtatcacatcgtggttttgatttgcatttctctaatgatcagtgatattgagctttatttcatatgtttgttggctacatatatgtcttattttgagaagtgtctgttcatgtcctttgcccactttttaatggagttgtttgtttttctcttgtaaatttatttttatcgatgctggatattagacctttgtcagatgcatagattagaaatattttctcccattctgcatgttgtctctttactctgttgatatccttttgcagtatagaagctcttaagtttaatcagatcctacttctcaatttttgcttttgttgcaattgcttttgttatatttgaaatgaaatctttgtttgtttctatgtccaggatagtattgcctagattatcttccagggtttttataatttggagttttacatttaaatctttaatccatctttttttaaaaaatttttttgagatagagtttcactctgccacccaggctggagtgcagcggcgctatctcagctccctacaccttccacctcccaggctcaaacaattctcatacctcagcctcctgagtagctgggattacagctacctgctatcatgcccacctaatttttgtatttttagtgtagacggggtttcaccatgttggccagactggtcttgaactcctgaccataagtgatccacgctcctcagcctcccacagtgctgggattacaggcatgagccactgcacccagcctttaatccatcttgagttgatttttgtatatggtttaaggaatggctccagcttcaatcttctgcatatggctagccagttattccagcaccatttattgaacacggagtcttttccccattgcttgtttttgtcagctttgttgaagacaggatgattctacgtgtgcggccttgtttctgggctctctattctgttccattggtctatgtgcctgtttgtgtaccaattccatgctcttttggttattgtagtatagtttgaaggtgggtagcttgatgcctccagctttgttccttttgattaggattgccttgggtattcaggctttttttggtttcatatgaattctaaaataatttttatagttctgtgaagaatgtcactggtagtttgataggaatagcattgaatctgtaaatggctttggacagtatagctgttttaatgatattgattctttctatacatgagcatgggatgtttttccatttgtttgtgacttctctgatttctttgagaaatcttttgtaattctcattgtagagattttttacctccctggttagctgtatccctaggtatttttgtgggtgtgtggcaattgtgaatgagattggtttctgatttggctctcagtttggctgttgttggtgtatagggatgctagtgatttttgcacattgattttgcatcctgtaactttgctgaagttgtttttcagctggagcagcttttgggctgagactatggggttttctagatagaaaatcatgtcatttgcaaacggagatagtttgacttcctctctttctttttggatgccctttatttctttctcttgcctgattgctctggctaggactttcaatactatgttgaatagaagtgatgagagagggcatccttgtcttgtgctggttttcaaggagaatgatgctagtttttgcctattcagtgtactgttggctgtgacctttacagaactcttcacccaaaaacaacacagtatacattctcctcatcaccacatggcatgtactctaaaattaaccacataattggacataaaacaatcctcaacaagtgtaaaaagaaccaaaatcatatcaaacacactctaggaccacagcacaataaaaataaaagttgagactatgaaaattgctcaaaaccaaataattacatggaaattaaacaatacaatatgtcctgagtgacttttgggtaaataatgaaattaaggcagaaatcaggaagttctttgaaaataatgagaacaaaaatacaatataaaatacaatatactagcatgcacaaccggttcccccaaacatggagtcctgcagcccagttcttacctgaatcaggatggagggtgtggtgggtccaagtggagctgttggccatgtgcctacttgctgcgtacctgcagatcccactccctcaggtctccctggcccttcactcttggaagtcttcaggcaaatttttcacttacgagggactgcatatattctaccaagactctgtgggtgtggttggaagtctggagatagctgtgcttttacacagccttccaacatccagctatgattggtacaagatttgggaaggtctgaccttgaggtttcatcaagttcttgtgcttgatttcttaggctttggcttcagtgacaatccacaaccacatcactattccatatttgagcaggccagcattatggaagtgcttttgtggcatctggggctccagaaccacaggaccaaccttttgtctcatgactatggagatattgttgctcaggagctcctctaccagtacaagcagaatcaatctggtaggcttaccataaagagtatccatctgtcaaatggaggtatctttcctgagactcaccgtccactccttctccaaaagatactcaaagatggaggtgtgctgtcacccatcctcacgtggctgatgaacttctttgtattctcgatgtctcaccccagtctttgggccatgtacttggccctctgagagtgagctgtgggatggtacatgtgggcagtcccatcccacagctgcaacaatgatgggaacttagtcattgtcaatctcttacagtacatcatcaatcagagaagtttagaagacaccgagtgggagctcttgcctctgaaactaaccccattgattttatctatgagccactggatcctgtaaayccctatccagagtttttcgagctgtacaggaaaatgctgtcacggtccatgatgtcaattctggatgaccacattagccacgatccacagctagaggatcccatgggcttcctgaatgcatacctgggcttcatcaagtccttttgagttggaaagagtagattcactgtattacctcccctacccccttatccattgcgtattccacttaagaagaaatgcccaaaagaggtcctggccatcaaacactgttctctcacaaagtccactttactcaaattggtgaacagtatataggaagaagccagcaggagctctggctaaggttgacataatagtccacctcccattactttgacatctgatcaaatgtacagacttgcctttgtttttatgtttctaggaaattctgattagtactactattcactgatgcagaaagacattcttttgcataaaagactgtttaacactctggacttttctaaagtatttagtagtgctaatttctggcccagccctaataggaattctgcggtaagaatgatgagaagggcctccttccttctcctcgaatggctttatgcgcacatgctttttaaaagttctttaagcaagacagagctgagtcttatttgtcataccttgggatttagtttcatcagctgtttttaattataaacatagcattaaaatagatattggtttaaataatgtagtattcttagtatgatttaagacttatgatttacctacatattatacatatttgataagaatgctaaatcaatatacccttactctgccagtgaacataattaaacatgtttcatttctgaataaatttaagtagatccaaactatttactgaatttactaaaatcacaggacattaaggaccagtagcatctatgccagagatttaccgttattgccagtaagaccgattctaacagcaaataacagtctgagactcctcatacctcagtgcttagaagcatgtctctcttgagctaccatagaggggaacggatggttttgttgtccaagccaccatatgcaacgtacattgattcctttatgatgactgcttaactccccattgcctgtcccagagaagctttctcatgtagcttggtaattcctgtactttacagacagaaaagttccagaaactttaagaacaaattctgagagacctatgagcaaatgatgctgaatactttttttaagccacatttcactgtcttagtcaaagcaggattattaagtgactatttaaaattcattttttaaattagcaacttcaagtatggcaactttgagactggaataagtatttattttctgtaaataaaaatgaattgtgacaaaaaaaatgacaacatactagaatctctaggacacagctaaggcagtgttaaaagggaaattcatagcactaaatacccacatcaaactcttagaaagatctcacattaacagcctaacttcataactgaaagaattagagaagcaggaacaaaccagccccaaagctagcagaagatgagaaataaaaataaaaatcaggccaggcacggtggctcacacctgtaagtccggtactttgggaggctgaggcaggggggtcacctgatgttaggagttcaagaccagcctggccaacatggtgaaaccctatctctactaaaaatacaaaaattagccgggtgtggtagcaggcacctgtaattccagctattcggtaggctgaggcaggagaattgcttgaagctgggagacagaagttgcagtgagccaagattgtatcattgcactccagcctggggtgacaagagcaagactttgtctcagaaatcaaaagttcaacgaacccaggagctggttttttgaaaaaaaaaaaaagtaggccactagctagactaataaagaaaaaaaaaacagaagttccaaataaacacaattagaattttgaagggaatgttactactgacctcacagaaatgaaaacaaccatcagaaactactacgaacacctttacgcacaaaaactagaaaacttagaagagatggataaattccgagacacatacaccctcccaagactgagccaggaagaaattgactccctgaatagaccaataatcagctctgaaattgaatcagtaataaatagcctagcaaccaaaaaaaaaaaaaaaaaaaaagcccacgacctgatggattcacagctgaattctatcagatgtacaaagaaaagatggtataattcctacagagactattcccaaaaaattgagaagagggactccttttcagctcatcctataaggctagcatcatcctgataccaaaacctggcagagacacaacaaaaaatgaaaacttcaggccaatacctttgaataatcgaaacaaaaatcctcaacaaaatatttgcgaactgaatccagcaacacatcaaaaagctaatctaccatgatcaaataggcttcatccccaggatgcaagattggttcaacatatgcaaatcaataagtgtgattcatcacatatacagaactaaagacaaaaaccacatgattatctcaatagacacagaaaaggctttcaataaaattcaacacccttcatgttaaaaactttcaataaagtaggtattgaaggaacatacctcaaaataatgaaagccatctgtttatttagttgatactatgtgctgggtatatttctaagtgtatggacacagcagtgaacaacattaaaacaaagcaaaataaaactaaaatgttcctactctcagggagagtttaaggaacttgcctgaagtcacaaagctcctaaatgacagagctggaattgaaacctagactgtgtgactctatagcctatgctcttcactactaagctgtggtgcctttcttttaaaaaattaattaactttatttttagaccaattttggttttacggaaaaattgagtggaaattacaaagaattctgaatccattcactgctcaatcatgtttcttgacttttgatgcagaaagcaatggaaaatgaataaaacactagtatacctaaagaaaatcccctcccttttctctgtacttgcattacaataaagtaagtgaaaatttccatcatcctaagttattcattcattctttccacacgtacttatagaacctctcccatgtgtcaggctactcaaaaagaatgatgaataaactgacatgaaccctgaccttatagagtttatggtagaatataaaccttggcggagacaatatcggaaatgaatatctaattacaaaagacagaaacattaaaagacaatgtggcaaacagttttaaagtccaagttctttttgagggagtaatagttcagtgacacctggaggatgaagaaaagttaaccttgcaaagaaaagaggaaaggacatttcagggaggggatcaccacacacacagttactgaggaggttaagaattcgaaggtttcaaagtataaagagctgagttggtaaaggaaatgaaaaatgactggactgagagataggaaaaaagccaggagaatttgttgtcacaagaatcaagagaagtatgatcacataaggtcaagtaagtttaagattttttaagaggtccattggaggatgtttgtgacctttcattttttgatatcagcattaacacaagggctgttttaaatggctttctaaaaaatttcaagtgcatgttttcctatcgagaactgtgttctcaaggttctgagtaaagaagtgtctagttaatggccgatgagaaagtcatcataggtgtgtgtagataatatttaaaagcagttgaatatgcaaggaagagagaacagtcagtagaaatgaaggtgcattcagggagttcttctttcctttgcttgagaccaattagagaaaattaaaatgctgttttcagaaatctaacagagagggagaggctgaaaatgcaagtaggaggagataactgaggtggtagaaatgttagtatctggatagccatacagggaaaggcctctgctagaagaagcctcacttactccaaggttgttagaaggaaaaagaaaagatgagcaaagatttaggtcagttgtatatttgatgacaatatcaattatgatttttaggaagcatgcagtgcacatttaatatagaatgagaaagggtaggagttggggagaaagagaggtcaggtccttgaagtcagtaaaggatggttgtggagagtgggaaagtgaacttagagaaacggtaagtatgccaaccagtgttgggtaaccacttgaactaacaaccaggaatttatagtgagatcagcaaattagaatcgagtttcattgggcctagagctgaaatgggagtagtttacatacagtttctctctcaaatatcttgatattatatccagggctggtccaatgtttctacagttattaagagcccaggcccattctgttttggcactctgctttctccatcatttgacttccatttcatggcaaagatggttttctgttccaatcagcaagaaggggaaagagacaaatagagtacatctacccatcttttaaatttgtcggcgagtgagatgattgaattaatcactttggaaactgagcaggtgaggtgttgaaaagtctaggatcagctgggcacagtggctcacacctgtaatctcagccctttgggaggccgagatatggtgaaaccccatctctactaaaaacacaaaaattagccaggcatggtggcacatgcctgtagtcccagctactcgggaggctgaggcagaagaatcgcttgaacccaggaggcagaggttgcagtgatccgagatcatgctactgcactccagcctgggtgacagagtgagactctgtctcaaaaaaaataataataataataataataattctaggaccttactgtgggaatgaggtggcaggagaaaaagtcattggagatgaggaagtcaaggatggaaaatccaaattattagtgttattcctgtggaatatgatatccagattgatagccagatttagggaatagagagacttgtgctgttcttcgtaatttttttcttaatttctatttaaatagctttgaggtacaagtgttttttgttatgtggatgaattatatagtggtgaattctgagatttttagtgcacctgtaatttgagtagtgtacattatacccaatgtgtaggtattttttcttcctaacccacctttccctcctcccacttctgagtctctaaagtctattatataactctgtatgcttttgcatactcataacttagctcccacttataagtgagaacacagtttttggtttttccactcttgtgttacttcacttagaatgatggcctccagctccatccaaattgctgcaaaagacattattgtgttctttttcatggctgaatagtattccatggtgtatatatatcacattttctttatccactcattagtcaatgagcacttaggttggttccacatctttgcagttgtgaatggtgatgctacaaacatgtgtgtgccagagtctttttcatatagacttcgtttttgggggtttgatacccagcagtaagattgctgaatccagcagtagatctacttttagatctttaaggaatttccatactgttttccattaggttgtactaatttatatatttctaccagcagtgtataagctttacttttcatcatatctgtgccaacatcattgttttttgactttttaataatggctattctgagtggtatgcatctcgctgtggttttaatttgcatttccctgatgattagtgatattgagcatttttttcatatttttgttggccatttatacatcttcttttgagaagtgtccatttatgtcatttgcctactttttaatgaaattatttgatttttttcttgctgatttgagttccttgtgtattctgtatattatatatgtattctatatattatattctgcatattcctttgtcaattgtatagtttacaaatattttctctcattctgtgggttttctgtttactctcctgattatttattttgcagtgcagaagcttttt

SEQ ID NO: 95311 - DNA, 184026 bp, Homo sapiens
  misc_feature (1)...(184026): n = A,T,C or G
ccttatttctgccagcacatttcatcagaaaattcttttcaaggattctagagaaagatacatgcatgatctgagaagttttacttttgtccctctcactgccttatatattgtctgcaaaaagccatactctgcttcatcacctttgggggtttaggtcatgggtagatgatggatcagagagtgaatggatgggtggataggtagatgggtatatgagcaagtggatgtgtggataactagaagggtggatggattggtggatggatgagtaaatggagggatgggtggatatcaggtagaagaacgggtaggtgaatggatggatggatggatggaaagataacagatgataacacaagatagattaataatgcaagtcttccatcttatgcaatacctttgccatttaattaatttataatcagccctaaggtgctgaggctcaacaccacttatgccaaaaaaaaaaaaaaaaaacagagtcatatgatctattatgatctatttcctgtcttccacaggggcagcagggtggggcttgccaattatttcatggtcattctgactcagtgtgtgctttgtgaaatgaaagaaaccatcttcctttatagtatatataaatataaaaatgcttcagtgtggtagtacttaactaggtatatgcagcaaattctcttagagaacttgccctaattacatatttgcagcccctaccccctccacctgcagcctgaaatgtgcattctggttgaaaatgactactctgacagaagattctctggtacaggtagtatttgagtggtattgagcaatatgtatcggacttcattttgtccttgcagacattgcactaacattttttcttcttttcttttttttttttttttttttttttttttgagacagtcttgctgtgttgtctaggctggagtgcagtggtgcaatctcggctcactgcaacttccacctcccaggttcaagcaattcttctgccttagcctcccgcgtagctgggattacaggtgcgtgccaccatgcccggctaattttttttgtatttttagtagagactgggtttcactgtgatggtctcaatctcctgacctggtgatcctcctgcctcggcctcccagagtactgggattacaggcgtgagccactgtgcacggccttgcactgacatttcctaagtacttgtattacctcatttaatctttaccacaactctttgacgtaggtaccattaatatttacattttgcaggtgagagaatatagaagttaagtaactttgcctagccagacagctagtaagaagcaaagctggggtttaaacacaggtagtgtctaaactctgtggccccacctaccatgttacactgcctctctaatcattaagctgacctttgagagcactatgctgcaatagagctttctgcaatgatggaaacattctatgtctgcactgtcctattaatgtgaaagccaccagtcatatgaggctgttgcacccttgaaatatggttaatgtgactgagaactcatttttaattgtttaattttaattagtttaaacagcagagtttaaaagccgactaacagtttctgttcatacatatgatctcaaaaaatgaagtgctgaactaggaattaaggcaggcatctcagttgtagacattatcctttattaataatattaacacgaaataattgcaaagcactcttagaatcctttgtgcttccttccatccttgaaaagagtctagctgttcttctaagcactctgtcaactaagtggcacatctaatcttagcttattggaagatgtattgagatgagacaaaattcacgtggaatagcatagggaagtcacaggcaagctgcagcatggtagtgccattggcatttattctcaggagtcaccattacattttccatctctcaaatgttgccatcatatatgggactgaggtggggtgttcgtggaaataatgcactttaaagcagggtttaatagtggaagaacaggggtatctgcacacattttgaaggcagagatgttacccaaaactccttcttatggaaggaaatgaagacaataaggtagaaaagtgagaaattaccagccaagagagaaagaaagatgattctggatgaagtaatataatgcattctagatgaataatataataaaaagccctattattcttcatgagatacacaagttgaaactgaattaagcttttaaaagggaaggaaaagtaaagtgttaacaaaacccaaatgtatatagctaggttttataaggatacagacaaggcaatgtagaattctgtgaaattgttaaatgttggtttagaacagaggtggacaaactacagcccatgagcaaaacctagtccactatcagtttttgtaaattaagttttattaagtacatccatgcccattaatttattatatagtctgtggctcctttatactacagtggcatagttgagcagttgcaacagagactgtatagcctgcaaagcctaaaatatttccagtggccccgtacagaaaatgtttgctgaccccggttttagaacaaaaaggtaacatatattcacataactgctttggagtacaattttgtgcgtccatcaaattttaagatgctcataatccttgttctggtaacaccgctactagaattttatccagcagacgtattggtgcacatgcccacagggcttctttgcactaacctaatagtactaaaaaagtagaaacaacctaaatgtcttaacagctggccattggttaaatgaaatgcagtgcattgatgtacagagattctaacttattttttaaatgaggtagttctatatgtattatttattttgaagggatgttcaagaaatattgctaaatttaaaagtgttgcagagcaatatgtatcataagaccatactggtataatagcaacaaacagcacccccccacacaatcccaaaaaaatatacagatctatgccaagcaccagttaagatgcctggcacatggtaggtattcaacatttaatgaatacatgtagaggacttttacttttcactttatatcttttggactagactttgaatttttatgagcatgtattacttaaatctagatttatagggagtgatggaaaatgtgaaaataaaattttaaaaaggaaaagaaagagtaaagatctagatttaaaaaaggaaatgtaaacaagatgaaatagccaaagataggtctccccaaaactaatgttgagacaatgccaccagcagtgacagtcagctaagagatggttcgcagctcactgctcagtactgaggcattcagcaggggttgtatttaactttcaagttggaaccaaccgaaactgttgggcttgaagagctgtctttatgagtcatcgacggcagaaagcacagaagcactaaagaaaataattcagaaatgtggaaagagaaaagtatgcccttgtcttgggagaacaatatttgtgtgtaaccaagtaggaagactttgtggaggaaagtctgaaaaagcagagagctgaagagaaaagagccaaatgaaggacacggtggccaacactcaaagtaaaaagacatttttgaagaagatgtgtttctagggtttctaagaagtcgctatactcatgcccagagccaccttgcaagttcatttggaaagtgcattggtgtcttttggtataagatccacgaacatcaacagtcctgttatgtgagcaggtgttcatactgaagggccacaagcaaagtttccatgtgttattactgttagaacttcccccgctcccttccaacacaaaagcagctctgcctgctagtatggaagccctgggaagagcctcatacttgcctcgtgctgccaacatctctgccttggcttccctgctggaacacacaagtcactcagtactagccatttattcttctggcagaactgtggcaagaggggattaacagggaaaaaaaattaaaaaacaaacaaaaagccaaaacaacatgaaagagctgggcatgtctttaaaacaatcagtgtccacctcccccagccctgtgcctgtgtctgcctgcactttgcatgtctgcccctgtggtggggggggatatgtctgcgcctctgaaaatcttcttatttagacatcacaaggtattagcccaattttgaacacagccggctgcagtacggtgcacagacacgactgctctttcttcagaaaactctccagttcaaacatgtttgcagagcatgattcatggtgtttctttctggattgtccagtgggtaattgctgtacgaaaaccagagaaacagatgtagaccctgaaccctggctataaatttttgttttatgattatgggtttcaaatgtgctgtgtcacactgacaaatatacagttactctgaaacaaaatggattttactctcaaagttttgctttttgtttttcactttttgtttgcttgttggttggaaatacatttattagatcattgatcaaacacaaagaaaatagagatgacacatatcagaatgttattttatgccataacaagaagatatttgggaaagtttcttccaaccctgtggctaatgtttaaaatgggtgtcagtagtttacatttcattacggacaaatcggtctatttttcactttctaccctactcattaatctttatagtgcacggatctgtatttaaagaattatggcttatttatgtatctttccttcattttacttaaaatgaagaatttggagacagaatcaagttttcaagaagtgtaagcatttactgatgaagaaataattagcatgtggctaaatcatgggtctgttttataaattaatacttggattaagtaatagctctaattattgctatcagcataattaattcatgatgaggaatgattaattgactagcgaatattgtcatattataagaaacccatactattcctttcatggggatttaaatactgattattcatttcaaggcccaagttcatttctcagttgagaacttcaaggtaattatatattttacattttcttgcacaaagaaagaaaacatcgagtcgcccaacctttaccacacacagagagagacacactaatgttgttatttttgtgcaatgatacagtatagaggtaagaaattcggaagcagtggtctcgctcaatgaggctgattccatagcttaagaaatgagaatgaacagaattttgaggacacccatccccatcttcacttccctgggaccagtgcatctctactctttggagagatgttaagcaagaatgtgcagcagcctcccctggataacagatccctgtacacacatacctgtcagtgatgccatgtttctcatctctaacttaagtttctcctgctctacttccaatatagctgtttcctcttctcttgtctaacaacttttcatccacctccactgtccggtaaaaatgaactcagtttccaaggaactctaaggaccttaaataagcatttggagccataagcctcatggaccaagtagaaattggcacataatgtagtgctttgtgtatctttacaactaccttaatgacagtgtgttaaatgttttgtaaattcctctgtgttctcttgcttaaaatgtgtgttttctttgtagttaaagggtttcttacaataagtctctgttacaaaatgatggccatataaaagagagaagagaggcgcaaaaataacaaacacagattcagcaaaaatctcacccctttattgccctgaacttttcaatagcaagaactgagcttgctgggctgaaaattgttttaatgtaccttcataaaaggatctttgacttggtaagtgtgtgcgatgcatacttttcatgttacaccacaagtgccacttagcaactccactagacagggcagtgtttcagcatggggtggggtgccccctgacaggcttttaaaaggcccggatgccaatgcacattccaacactatccacaaaaaggagactggagcagtgctcttccctgcattgggcaaggagactctccctccctgcctaaccacttgcctgccctgttttgtgggagaattacaagtaaatgctacagaggcagtggagaaaaaagggtgttttaattcctctccagagtttcctttatttgatgtatgttgcatcctttaaacaagttgtgcaaaatggctgcagggtagattggctctcccttttaaagctctccatccggctgggtttatttgtaaatactgcatctatccttcttagtgttttaggactggctggaaagactcttcttcctgtaggttgggtcagtgtgagagatctaaaaaatcattttcccttaaaattactgtattttaataaaaggattgggcaggggctggaatgagagaaaactggtccttcaaaatgtaaaactgtcatacttaaaccagtttacaaaatatgcgtttaattatgtggtgggatgtgtgtaggtgtatgatgagagaggcaaccaacatggctatttggggtgcaaggatgtgggaacaggcaagtaattttcacattggactttcatcctagggagctgggttctagtcacagctctgagctgtgtgaccttgggtaggtctcatctccccggggttttgtttcaccagttgaacagtatgaggatgagtcacagctaacatttgttccatgatatttacccagcaccatacaagtgttatttctgtcctcccagttaacactgacgtgggtagtattatatgcccattttacagatgaggaaactgaagcctgaagaagttaaatacttatcccagaacacacagctggtaagtggcagacctggaattggaatctagttcagtttgattccccaacccatgctcttgaccactatactgttttttcaagtccagatctgaaatctcattttctgtgtggctgtgtgtttgggacaggggtaaccaattcctgactactctatatgctgcatagaacctggagaggatttttcaaagtaaatgaatctcgaaagctggattgcagagcaaacgagtgcagtcaattcagccaggggcttgcaagagggagaaagagaaaaagactgtggaatggaaagtttcccaacccaagcctttcccaaggggtagccattctctgttctacagtttagggcttgcatgtgctttttctggagtggaaaaatacataagttataaggaatttaacagacagaaaggcgcacagaggaatttaaagtgtgggctggggggcgaggcggtgggcgggaggcgagcgggcgcaggcggaacaccgttttccaagctaagccgccgcaaataaaaaggcgtaaagggagagaagttggtgctcaacgtgagccaggagcagcgtcccggctcctcccctgctcattttaaaagcacttcttgtattgtttttaaggtgagaaataggaaagaaaacgccggcttgtgcgctcgctgcctgcctctctggctgtctgcttttgcagggctgctgggagtttttaagctctgtgagaatcctgggagttggtgatgtcagactagttgggtcatttgaaggttagcagcccgggtagggttcaccgaaagttcactcgcatatattaggcaattcaatctttcattctgtgtgacagaagtagtaggaagtgagctgttcagaggcaggagggtctattctttgccaaaggggggaccagaattcccccatgcgagctgtttgaggactgggatgccgagaacgcgagcgatccgagcagggtttgtctgggcaccgtcggggtaggatccggaacgcattcggaaggctttttgcaagcatttacttggaaggagaacttgggatctttctgggaaccccccgccccggctggattggccgagcaagcctggaaaatggtaaatgatcatttggatcaattacaggcttttagctggcttgtctgtcataattcatgattcggggctgggaaaaagaccaacagcctacgtgccaaaaaaggggcagagtttgatggagttgggtggacttttctatgccatttgcctccacacctagaggataagcacttttgcagacattcagtgcaagggagatcatgtttgactgtatggatgttctgtcagtgagtcctgggcaaatcctggatttctacactgcgagtccgtcttcctgcatgctccaggagaaagctctcaaagcatgcttcagtggattgacccaaaccgaatggcagcatcggcacactgctcaatgtaggtttatttttttcccttcttctaccaagaaaaaaaaaattgtctctcttgcatgcaataaagacgttggaaataaactgcattggtagcaagacaaaggatttaatgatttaatgctgaaggggtgtgatatgctggcatgcatattgattccctttgctgaaaatttcctgttagatgttttcttcccaaataacccctcccgcccccatgctcctctccttaccaaccttatagtctcttgaaaacagtttttaaaatatgcataaaaatgtggggggtggggagtagagggtgaccacaagactttaaaacattcttcaagtagggcaatttgacacattttgcagtttttactaaaatgtatgcagagtggaatttaactttgctgttctttggattagctactagttgtataggtccccccaccccttgtgtattccaacagtccaaagtaattaaaatatgacattttccttgaaaggaatttagtttaattaaggtggctgctgctcccgaagttcataaaccaccagttcaagctgccgcttccaatgttttccttgctaaggaaaggcaatatttcttagcattgaccctgctgccacctttccaagtcactttgttggtctaagaagttgctgttttgctagaaaactactggcaatgaacaccccttggactgagccatccattatttccatatcttgcagttcagcccggaacgtggacatcagttaaaggaaaggaaatataagtggggtagcccaatttaaaaaaaaaatattgactattttgttatctgatgctgacacagtgccgaggtacgcacctggtcaacagtagcctggctgcaggcttgagaaatgatcaggagtcccagaaaatcccaccttcgggtggctgtagtgggagcctgcaggatgcttcgccgccctgacagtgatttagataaatggctcagctatctatcaaaatgtttttagtactttatttgacaattcattggagcattagcctgaaaatgacattttaaatctttgttttcaaagaggtcaaagtttaactggaagaaattgagttttcctaataacatggtggcttatctaaagagagaagaaaaaggggagaggggacaatgacaggatttaaattgccctctctgaaactttttcttaagaataaagacttgcttcttgggccgggaaatcaacaggtttgtagctgaaaaatcaataaccatttgatgccaacagcctggctgtctgacttaacattttgtagagccataagcagggcaaaaagaatatcgttttcagaaggygccttaatcttcagctgctccccaaatgccttttcttttttggtgcccattttatttctggagaactcaaagaaactggagtgttacaaaataattttctaatccaagaagagacttttcagacctgtcctctttgtagcaattaaaacagtatgaacaatttctgttggaatcccagggaactggggctctctgaaactttttcttgttagagaaagtggtaatgaaacatgttttttaacagaaggaaaaaatatgctcaggatcctcgccaaaagttattagacctaatagagtttttacatgtagacattcttccttttgtaattaaccytccaaagatgcctattaagttgtaagagtagggggaaaagctttgtttgttcttggacaagttaaacaagggatttgctttatctagggagagcgagcggtgaatgtgtcattcgcctaaaactacccgataagcaagaagtgttgataacagcaaagtttagctaatcaaagaaacttgcattagacaaagtaaataaaggcatttgacaaagggatttcagaaattccagtgtcttatttttgtaagcagggcaattagttcttattgtggtcagtttcacaagagtttgaatcccacaccccaacttkaggttaaatgaataaaatgtaaatattgcttgtgcccttgcagagttgctttaccctcataaaccactttatgatggtcagttgttccaacgatttttttttttttttagcataaataaaactaaaacttttttttttttttttttttagagattctaacaaatgtcttgtgccatgcagtgtttggttcagggtggtacagctagttagggctattgaaataaaagtatattagggctacatttgtgtaagtaagaacataaccacaaccttttccattttacttaatggctattttgacgagaagcagatctgtttttgcttttaacacagaggaaacagtgggcaaagaagaaaaagtactaaattccaaccaaaactattttctgctttgagttttttttatggtgtgtgtgtgtatgcatagtaaataaagtaagacctttgaacatggagcacaccatcacaagctcactttgaaaggtgttaaaatattccctttattttctttttaattttaaaggcagaaaaatgatatgccagccagctgccatttgtagtagtgtctgtgaattgcttcttataagcattcaaagtcaggattaggggactactaagggaatgtggtctaaatattacgattgacgactgcccctggaaggtataggagtcactaaatttctgttcagatgtctccaggattatcttggttttaggcggctccagatgttttcaacattaattgctcagtgggtataggataaatcttaatattttgtggtctaaatatagttgctttggtgaaataacgagtgtgacaacttcttggcctttttccctgtcttttctccctactcaacacatcaaaaggaaaaagaaaaaaatattttctttttgaaataggactttgcccattaatgagaagaaattatttttaaaacaaccagtagtgatgtttgattagggaatgagaaaaggcctcttttcaaagccctgggacccaaattttaagtattaaacagtatctaaatcctctcctagtgagatataaattggggtcaaagtggcaaaatcaaagataccctctgaaagaaagactaaataaagactgacagccaccgtatgaattgaatggggttttgaataaatatttcagtgaaaaggcccaattgtttttctaaagtaggacataattttctgcttctcgggcacatgacggtggtaactaataccatcagaaagaagagaaaaagagggacttttccttaaatcgcaaagagagtacaggcagggttgtgggttgttcgaaaacaagtgaaagattcacaaagttttccttccttgtagaaaaaaagaaatcatattgtgaatattggataaattggtacatttgacaagggagtgagtattgatgtgcaacttagaaaagaaaaagcatgtgtttaaattttattgccagaaaaggatggattcaaaaaactaaacagtagaaaggtagacatctgtttgcctaaacttaagctatggaattgacttggaagctttagttagaatttgatttgccagccaataatgtaaagcccttgcattgaakcaggtcttttttccttaatagataaatgaccagaatggctatttctgataggctagctgacctgaatcagaagtttccttctcatttctagaagcctggcgctgatatatacaaccgagggtattgttatgcacttttctctaaagcgtaagaataaaaaaaagttcttctggatatcagatgtttataatttaccttcgacatatgttaagctctgaggtggctgaaaaagaaagaaaacctgttttctcctttacacattccacagatatcattaaactctatctgagaagggaaatacatgataaataacaaagattataaattctactctcaaggaatttataattttttaaatcagtaatttagaaaaagctgagaattttaagttactctttgggcagaagatggagatgtaaaaaccaagatgcaaaatacaaaactctgttcaagtcacacaggattttaacaataaatgcaatgttcattttagaacatcttagaatcttctatacagtttgagttatgtgtaagtgccatacatttatccttaaatgacatttttatactttaaatgttctaatataaattcagttaactatcaattaaatagattatttcagaaatgggagtttttgatgaaggttaatcagaaaaatcttggctgaaaacctttccaaagatattaatgtagatagaatcttgcctttcaaattacagggtagttatgacaatcatgtatctctgattttctagaataacccactttcaaatatcctgcacagttcccacataaatcattgaaatatgccagatatttaatattacaacatctcctaggagtggcacagaaagtctttgtttggattctatagtcaatataagtagagctctcacagcttaattttttcattatgtctgaagatcgccttgtgtttctgggtcattcttatgaacatgaattcctttcgtagcaaactatagatctgtgaatagaaggcattccttgcaaaatggactgggctgtgattctcactctagcacctgtgtgtgcgtggacagggtggggaggagggagtagaattaaattaaattgttatgaacaaatctgtatcagcccttgccagcttcctcttaaaaagttggagctggggtgatggagggagaagagyagagttaactcaggtttcagatttatcagtatcctgcttgtaagtggcttggtctaagtacctcttgttaaataggagatgagataacctgccccatctgtaagatctaataacacaacctcatcagtcaatatgttgctctgaattctcctcttttcattcccagcttccttaccccatcattaaaaagcatgatctctgtcccatcccactccccaaacccctttaaatgaatgaaaaataaagttgcaaaagttctctctacctaggaagcaggagagcctaagtctactggcattttgtcttgagctttcagagcttcttagatgggaagtcaaacaggcaatggaactgctgacttgctctttctctggccctgtagggtgggggagctacaaggggaccatttagtaagataagactctctgccccctgcgcgataaggcgaggataacaggaactgacgtcagcaaggcgactcaacctggccaagcatttcctctagtcagggctcagggattccaggagtctctaggcttcccccagcagctgaagaactgaaccagctcaggggagggagaaagaagaaagctgatttttacaggggtgatagtgggtgatgatgtccctgatttccaaaagcagatttctttgaagagaacaaagaaaaactgggaggaagaaagtcgtttaataaaagtggattctgagattataaytgtcattttacattgtcatagaatagatatttgtgttccagctgtcaacaattcactgctgatgtctcattagacagtctatccagcaatcaccaaatatcatccactcacaaacctcgccaactctccatatagaacaaaacgtgagggatttcacgttgtcagagttaatccttggtactccttttttttttttttttctttttttttttttgagatggagtctcgccctgttgcccaggctggagtgcagtggtgtgatctcagctcactgcaacctccacctcccagattcaagtgattctcctgcctcagcctcctgagtagctgggactacaggcgtgtgccaccacacctggctaatttttgtatttttagtagagatggggtttcactatgttggccaggatggtctcgatctcctgacctcgtgatctgcccacctcggcctcccaaagtgctgagattacaggcgtgagccaccgagcccggccttgtatttacttttgaaagtacaaagttcccatccccatctgcatcagatgacaacattgctaaagccatttcatttgctaccagccctgaaaccacttagcagttttcctcccctttttccttcttccctttctcttaaacccagatttattttcattttattttattctttgccttccaaagtatctgatttgagatttggaggaggagaaaagtcaaacagaaggattttatttcttaaaattcacagattctcctcagtccactgctgtcttaaagatagcttcttattttttaagtttcagtgtttgacaaagaatcactgtcctaatttgacccatatttagtggaatgtttgctatgttgttgttgataaattactattcatcacagaataaaattttgtcaagtcaaaaaaatagctaaattcaaaataatgtgcaggtaaaagaacaaataagatgagtgcatcggttaactagggagagaagatctggatcacatcccaatttttttcccatttccagagcaaatgaagacctcatgtaataaatttgtcttctcaaaaatattaaagctttcaacggctacagtacctttgtcatgtcatcaaagtccataattataaaaaggccgatgatctgaaggccatttcagcttcaaaagatttttttaggggctggtctattggaaagcttgggggtttaattaactaaaatggaaatggaggcagcgaaattcagttcctgatgttttaatttagctcagtactgccatgtgttattgaagagaattcttaaaggcaaacataattatttcattatggtcctcagaatgctttcattggctttaatgacaagaagctgtataaaaaggcatatattttaattagtcctttttatatttacatcagataaacaacaaataattgatgaaaaacaagtctttggaatggatgatttcacatagtgcactggttacagtttaatgatgaaacatttctctgttgctttgcattttaattatatatacattatattacagtagtcgtgccatggagctactaaaataccgttgttgmcattttattacaaaaaaaatcacgattaatgcctagaaattgaaagctgaaaaatgtagctagacacatctccaaggaagtaaattaccggttccattaattttactacatttgttagaactcattttgatcacttttatcttttacgcttcatctttttggattaagatcgtcaggggtttcatatgcttttttatggccacatcttctcctgagcacctttctttcgctcttgctgcctgttttgaggatttgcatgtgaaagtgccttgccaaatgtgcactggaaattcagagagctttttttccatgctatcggcttgctttacctttgattttatatgaaaacccatttcacatgattcatccgttttggtgtacagaacactaattgttattattgattttaaattccgtgaccattacaagtaacccagatgactggcagataaagggtaataatccatggagttctggaactgtttcatgtttgtctggagtactttatgtgatcaatattaactgccccattgaaactaactgctgtatcaaataacagtcaatcaaatgaatgtgcttagagattatttattgaaagctttaattgttcactggggccctccttatcaggggaaacaatacaaactagaggtaggatgaacaggtttggatttgcagggaaagttgggggatgcagatgaacaaggcatctctctgcttctcgggcaagagtttccagaaacccatgttgggcttatagttcaggcagaagttgtgaatactcttccagagcttatcctatcacctgtacctcaaaggctttctagagaagggggtataataattttcttgcactcagcagaagctgtgaaaagttctccctttccaagagttttactgctgcttctccctggtcctctcagaattacccttccatgcatctctccacctctgcttccccatcatggcctgatggtccaagataatgcaagtagcctgccttgacacaggatcggtttctacagctatgaaatgggaataatagtgtctacattgcaggatctgtagaaggattagagatcatgtaaattaagattctattcttgtcttgaaaacatatggaagtcaccaggtaggccttctgccctgattttggcatgacacctgtggcttacgtgcctttgctaaaagcaaactttttttttttttttttggtcatatctaaattaggtatctcttttctttggtgaaatgatccctcggtctatagctcataacctaggtggcagtcctttctgtttgtcaggtagcactgtgccctgattcaggggcatccatttaccagatccccagatttcttgcaaatgattgacttttacaagtgagcattgtcaccttcaaagttgtcacaatacacttagcccaaagatgctgtcgtggcacagtacatttttattgctcattgatggattagtttttgcaacgtgccattcagcaaatggctcttgggtgtctgccatgtgccaggctccttgatatgatctgtgggggacaccaagatgaatcagacactgtcccttctccctctgaactcatgatataatgggaagaacttgtgacacaagtcgttgtcacataacccccttataacaaacccaaaaatctccccatgtctttgaacctaagattgataatggaaagaactaagaactgccaagaaccacagctggtttatatggtgggtgatcaagtggattatacatttttgtcacagtggagcgggcgtgaagtttttctgtgtgcaggcctcatagatcatctctaaaagtagttcacaaaggagttctaaacctatcttacacagtggaataagtgcacaccttccaaactagcttcttgaagactttcatgtggatgtttctggagcgtgttaagtaatcatgttccttggggatgggtttgattctattggatttttaaaaatcacttatttctctatgatttctgtgacttattcctgtgtaacaaaccatcccaaaacttcctggtctaacaatttattatgacattattctgtggatgggctgggctccgctgggcagaccctctgctccgcatgctgtcagctggggctgaatcatccatggctaaattgggctggcaatccaaaaagtctcactctcatggctggtggtggatgttggttgtcggtgagagctctaggggatctgcatgtgacttgtgcatgtcacagcatggcagcagtattccgagagagagtgtttcgagagtgaaccttccaggaaggaggcagcagaggctcccagtcctcttaaaacctagacccagagagtggtatacagtcrctttcactatattctgctggtgaagcagacacagggccagcccagattcaataactacctttcagtttgggagagaaaggcaaagaatgtccaccataacaatcgtagcgtatatgcactataacaagaaagaaagtattgtcttctgaaaatgattaaattaaagaacagttgtggggcttttagttttttggttggttccatgtttaatgaaatgctactctaatgacaacatacatcattttcagttaatcctcacaaccctataagtgagatgtcatcttcattttacagatgaggaaatggaggctcagggaaggtgaataacacggattgtaaggggcagwgtgtggtttcaagtcccatgaaaggcttttctctaggctccatgtgctgttactcacttgggggtcctcagcttcaggagttgtcatcctgtcagctgagtgaagaattcctgaaaaatgtttcatgccctaataatcccaagaataaaacaccatcgagtgttttggttaaggggaaaggtaggaaaaagagaggtaaagaactgtaactcgcatagcttcctctgattacattattttctctactataaaccagtcttttacattgtggaggaaactctgcccaaactatgaggctattttactcttttgcccttttgtttttacatcctgtttgctgttgaagtctacgctggcctagtcactgctgtagctcagggggttcagaccaggattagtctggtatttactgaagagtcacaagaagatgagagatgggaaactgggcttttcatgttactctagtttactggtaacccttatctaaagatgggtgctaagtgtttgtgctagagagtgtctcttcattaagtggagctattttgtcttccaytaccaaaagcaaaaaagtaaaagacaaagaggaagaaagaaaactttctgatagtaaagtcgaattaatgtttatttgctasgtattttaagtatctattgtgtgcagaggatcccaaacctagttaaccattaccatttagtgaaacttacatgaatcatagtgcatctaattggcctctcagataatgctctcatttcagtgacttcaaacatgtcttattttttatttttttgagacagggtctcgctctgttgcccaggctggagtgcagtggtatgatctcagctcactgcagcctcaacctgctgggctgaagcaatcctcccgcctcagcctcccatgtagctgagactacaggtgtgtgtcatcacacctggctaggtttttggagagagagggttttaccatgttgcccaggctggtcttaaactcctgggctcaagcaatctgcttgccttggcgtgtcaaagtgctggaattacaggtgtgagccactgtgtcccgctcaaatatgtcttaaatggaatgtattctgtattttgaattttcatataccgtattctacctgtttcttttgtttgaaatctaattgttgctgaattatatattttgaggaaaaagagacaggtggacaaattgaagtgacttgctagaagtcgtgtagtgggttctaagtggaagcagatctaaatctgtaagacgctaacatgtgatgcagtgaaatacagcatggtaccctgcagtgtgatacagtgaggttgggtagacattcttcgtgcactgtacctgctgtggaagcttgagctccaggttttgttttggtttttttctaatctttaaaatgawtccataacacctcccttgaaagcctaagatcagtcttaaagccttaaataagacaatgtatttgacacatgatgctcagtaaatagattgtttttacatatatacatagttgtcaataagaaacttgttttaggcttgcatggcgactcataccggaaattctagcacttyaggaggcccraggcaggcagatcacttgagcctaggcacttgagaccagcctaggcaacacggcagaaccctgtctctacaaaaagaattatgtggcygtggtggcacgcacctgtagtcctagctactcgggaggctagggtgggaggataatcggagcctgggaatgttgaggctgcagtgagccgggattgcaccactgcattccagcctaggcaacagagggagatcctgtctaaaaaataaaaaaaaaaaaagaaatttatttwaaaaaaaaatccaggccaggcatggtggctcacacctgtaatcccagcactttgggaggccgaggcaggtggatcacaaggtcaggaattcgagaccagactggtcaatgtggtgaaaccccgtctctactaaaaatacaacaattagctgggcgtggtggtgcccgcgcctgtagtcccagctgctcaggaggctgaggcaggagaatcgcttgaaccggggaggcggaggttgcagtgagccgagatcgcgccactgcactccagtctggatgacagagtaagacaccgtcccccccaaaaataaaaaattaaaaaaaaatccaaatgctagcattgtccagaaaaatttaacagatttatttataattattataaagttgaactactgaaccttgttcactgaaacattttgatttgcattaatgctttacatccccacatttatattaaaaattcacacgcaaatgaagatggaaaaactgccaatacctaatttctgtcctctatttttccacttgcaatcatatacctaggtaccttttgactgcattagaaaaaaatacctaatattcagaactaccaataacaggaagaagaaattttttttcgggggggtgggtgggaatgaaatgtttcccatcatagtggactcctaagcacgttctctacgtatgcagtgtgctgatgtcttctggcataattgttaaacgtttgatatggataacacacaggttagtgccctcaaaaaggccaaccagataggcctcacttggctcctgcaaagcaccagtagctgcgctctggaagctcagatctgttttaaagtcctgagcaatttcttgcaccacatattggaagggaagtttgcgaatcagttcactggacttcgtataaagcctaatttcacggagtaccccagtcccaggcctgtaacaatgaggtttctccaccccgccagtagagggcgcactctcgtgaatggcttttgtggccagtttcttcccggatgcttttccacgggttggattttcgagtagtgtgctttgtaggaaccgtggtatggacacctccttactttcccccttctccttcgcccagagctcggcgaactagaggtggcgctggcgtcagagagccccaactgcaaatccaattccccgatattttatgaattttttttaatgcagaaaagttacaacagctttactgcaaacacctggatacctactgccatagctaccattaaaattaccaggtttcttttctgtgttctcacccttttctccttttgcatatgtttgttttgttttgttgactgggtcttctcactaaactgagagtctttgagttcaggtattgtgctttttacctctgttttcccagtgctaatatagtacttggtctatgatcctcagtaaactatggttgaacccacatgtatgttctaataaacaaccctttaatatactcgatatcagtgcccttcaatagaacttcctacaatgaagtttccaatgatggaaaggatctataattctacattgtctaatatcatagtcgctagccatttatggctgttggaatttgaaatgcggttaatacagctgaggaagtgactttttaattttattttatttttatttatttatttatttatttatttatttatttttgagacggagtctcactctgttgcctaggctggagtgcagtggtgctatctcggctcactgcaacctccgcctcccgtgttcaagccattctcctgcttcagcctcctgagtagctgggattacaggagcgcgctaccacgcccagctaatttttgtgtttttagtagagacggggtttcatcatattggtcaggctggtctcgaactcctgacctcatgatccacccgcctcgatcttccatagtgctgggattacaggcgtgagccaccacacctggccaattttattttattttaattaatttaactttcaatagccacacatggctagtggctactgtattaaacaattcacttctacatacttcagctattattattctttcagtatttgttcattttctttatttcctttttcccttcagcctttactcttctctcctatggctattaacaagctctaattatccctttatgtagcaggtaaacagactgcaggaaaatgtaaacagaatgctgtagggtggtgatttcagtcattgtttaactccttttccttctgggtggaactatttttcctggggcctggcaagtatttagcacttgttttgctaacatttagtttgcacagctaaaccaagatttttgcagaatctcagtgggcgggaattacattccctgtagcaatcaaatcatggagacatacgatgtctattcccgtgctccacacctgcttggttttgagatgggcagagtatctcccaacattttcaagctttcaactcagcttgaacatttcaacaaacttcagggaggcagagaggaactggccatattctatggaagcctcagtttgccttctgggaaataccatgagctctcccccgggtgcctcctcctgcttacgtgtgtcctctgctcataacccagagtgcggcacacagtaggtgctcagaaatatgctgagtgtagttcagtgaaaacgaaattgagaacatctcaagtgagctaatattttttggttattcaaaacacctctagtaaacttgatgggggctgtcaaaaacttgggaggttcagtttggctgggatggcaaagtaagtaagcccttataagtgcatttgctggcaaactggcctgaaaacatgagagtggaatatttccctgggctactggcacttactttgaggtcacagaaatagattttctgatggtacttcctgttagccaggacattattgctcccccttgtcccccccaccacccctttttttttggcctatccctagaaatggtgtgaagaaagtaaataaaaataaagctaaagcgcgccggtaatctcagctactcaggaggctgaggcaggagaatcgcttaaaacccgggaggcggaggttgcagtgagccaagattgcaccatcgttctctagcctgggcgacagacagacagtccatctaaaatatatataaaaaaaaaaaaatgataaagctaaaggaccggttgcggtggctcatgcctgtaatcccagcactttgggagtctaaggtgggcagatcacctgagctcaggagttcaagaccagsctggccaacatggtgaaaccctatttctactaaaatacaaaaattagctgggcgtggtgatgggtgcctgtaatcccagctactcgggaggctgagacaggagaatcacttgaacccgggaggcagaggttacagtgagccgagatagcaccactgcactccagcctagacaacagagctagactctgtctcaaaaagtaataataataataataaaataaataaatcgctaaaacaactctcaagagaaacttttgaaccacggtttgcttccccacccccatgatttaaagttgcgattgatttttattaaagtaaaacaatcastatcataattaatatttattaagtgcttattatgtgtcaggtgcttaaaatgaaccatgtcatctagtcctcagagcagcctgaagagaaaggccctgttatccccactttgcagacgcagattcctaggcactgagaggttcaaatacctaccttgaatctccsgagtaggagaaagtgagtccaaagttcccaactcrgctttgtataatgtagggttccttttctttgccaacgatataaatttctattttstttgcagggaagagggatggggaagattagaagcctcagaacccacagaataataaaagggttaacaagtgaaagctggaaataatacgtttttaacaaaatgggcagttcttctaattgctgtgcccctactgttcaattcctttttatgtcctaattcattaaattatgtacacatcaggcttattatttacagatgtatacacttccaagtggctcatatgaaacagatgtttcatgaaaggtaacagagaacaagtgatctaaaccctcctttagtgggtatcaagtgagtattatggcctattacctgcaggtcttttgctattattttgaactgcagtgtccagtacgggcaggaagattcaatgtatctcctgtaggaacaagtaaaaatacaacagcactataagcaaacatctgcatctcaaaataaaagagggtatgtgcaagtgataggcaggtggtattcacatttgggctccggtagatgtgtgagtcagttttacaagcaatttgagaaaaagagacccattgcattacaggaggtgaggtgtattgagcagaccrtctttagagaccagtgttaccatatcagttagctggagaaatgaatgaacacctcttttcttttttctttttttttggagacagaatcttgctctgtcgcccaggctggagtgtggtggtacgatctcaggtcagtgcaacctccgcctcccgggttcaagtgattctcctgtctcagcctcctgagtagctgggattacaagcacacatgaccacacctggctaattttttgtattttagtagagacggaatttcactgtgttgcccaggctgctcttgaactcctgagctcaggcaatctgcccgcctcagcctcccaaagtgctaggattacaggcatgtgccaccccgcccagccaaacacctccttttcaaaacaaggttaacatggcctaattaaaataagcatgaccagttcaccacgttgccgtaaactgggtggcatatgtcagtagacagttatttcatacttcttcagaatatcaaagagcagtccggacgcatagctcacgcctgtaatcccagcacttaggaaggccgagacaggtggatcacttgaggtcaggagttcaagaccagcctggccaacatggtgaaaccctgtctatactgaaaatacaaaaaattaacctggcatggtgggggcacgcctgtagtcccagctaccgagaggctgaagcaggagaattgnnnnnnnnnnnnnnnnnnnncagtagtacatcaagccccgataagtgcattagctgctaactgccctgaaaacatgagagtggaatattaccctgggctactggcacttactttgaggtcacagaaatagattttctgatggtacttcctgttagccaggacattattgctcccccttgtcccccccaccacccctttttttttggcctatccctagaaatggtgtgaagaaagtagataaaaataaagctaaagcgcgccggtaatctcagctactcaggaggctgatgcaggagaatcgcttaaaacccgggaggcggaggttgcagtgagccaagattgcaccatcgttctctagcctgggcgacagacagccagtccatctaaaatatattttcaaaaaaaaaaatgataaagctaaaggaccggttgcggtggctcatgcctgtaatcccagcactttggaagtctaagatgggtagatcacctgaggtcaggagttcaagaccagcctggccaacatggtgaaaccctgtctatactgaaaatacaaaaaattaacctggcatggtgggggcacgcctgtagtcccagctactcgagaggctgaagcaggagaattgcttgagcccaggaggcaggggttgcagtgagccgaggtcgcgccactgcactccagcctgggtgacagggtgagactccttctcaaaaaaaaataataaggaatatcagagagcaataataattgcctctcaaagtccacagtgagagttattatttataaattgtcaggagttctctaaacaagaacaaaaaagcaattggagcgaaaagatggctggaattgtgtcattttggacgttgaaagctgggaacagttacaactgaaatattaaatgggacatgaaatattaagtgacataccaggtttattgcatatatgaccatgagagtgcatttcattttgtcttatggagctctaaaaaaatccatgtaatggattaaaggtattaaaactcccatattctccctggctctacgccagggaacaaagcatgataaataatcccaatagacagaatatgtgggaaggaattttaaaatgtatttatggcggacatattgacctccctaactaataaaaatgtatacatgaggttttgaagaaaatgtgtagcccttacaacacactgtagtgttagtatctttaaaatattacccacgtctctgtgacatatggctgtcatcctctgtctttaccctggaagtgaggaaatgcatgaattttatagtaacatgtacagtcactgttaggaggaatagtttttatttcctttatcttaaagctgggctgaaaactacaccaaatctggattttgtaaataaagctttcttggaatgtgtcacacctatacatttacattttgtctgtgactgccttcccccatggggggcagagttgaatgactgtgacagagaccagacagcccacaaagcctaaagtatttcctatctgaccatttacaaaatttgcagaccctgccttaaaacattaaaaaatgggccgggcgcagtggctcacgcctgtaatcccagcactttgggaggccgaggcgggcagatcaagaggtcaggagattgagaccatcctggcgaacacggtgaaaccccatctctactaaaaatacaaaaaattagccgggcgtggtggcaggcgcctgtagtcccagctacttgggaggctgaggcaggagaatagcgtgaacccgggaggcggagctggcagtgagccgagattgcaccactccactccagcctgggtgacagagccagactccgtctcaaaaaaaaaaaaaaaaaaaaaaaaaaaattaaaaaatgaataggactgttaggaatataaatgtgtacttggtttctcatttatactaatcttgcgtgtggattcaggggatgaactcactttcagttcatttcctaactgtgtgaccttggccaagtcatttaacttctctaagcttcagtttcctcaggtgaataacagagatttaaaaaaagaaaaaaaaaaactgatcgtgttaataatccttgctcttcacacttttgttaggaggcagcaaatggggtaatgtgtgtgaaaacacccctcaagttgtcccccgccatataaagtgtgctgttggcagattctgctgaactggctgaaagtatttatttcacatcacatgtaaggatttgtatgcagatttcatttttttaattctttttttttttaaccaacactgattgaacttttgatatgtactggacactcttttagccctgagtatttaaagtcaaggccgccaaaatctttgtgtatgctagtaacacacccactcatgacagcctctgacccccatcagatcctttttctagctggggccatgtttgccttgtggcatttttcagttgtctgtttgcgtgggcaggagatagtgtattctaacttctttataaaccagcatgtatcaaggggtctggtccctggcaggtgctcaataaatgtttgtcagcagttgatgttgctgactgataatcactgccttctgctccccaaaccaccttggtccttgcaatgatttgggactttgggttttgaacagcaattgaaggctctccaatgagagatcgctgtggtaaagaggggtttaaagaagccatttctgagggggctaggcagcctggattggggattggccaggaaatcctacgaggaatgagagcacttctgattaatgcctgtgggcctgggaaggaaaggacagctgagagagggaaaactgacatgacttgctttcctcacattagtttttagagaatctctyaggtacatcagaagggaaaattattttgagagggaaaatggaagtgaaggtcaccaaatcaagatggggaaagaagggaaggtgaatagcattgagattcatcagcataagcatgatacaataatgataataattgcttgtgtaacactattatgtggcaggcattgtgcaaagtactttaaaatgatgttatttaatgctcacaatgatgcaatgaagaatatactatcattttatacaagcagaaattgaggctcagagaggttaagtaactttccaaaagtcacacagccagtaagtaggagagtgaggatttgaatccaggaaggccgactcccgagttcatacttccaaccatatgcctcagacaacttgcctataaaggtggacaagtttcgggaatatcaaaaaaagacctgaaccttgggggactgctctcaattggaaggttggtgaaaatgtctttgaattattttttcaagattttcttaacatttttaaaaaagaaataatgctaaagcactttgaaactcttagctttctcatacctaggaatcactgctctgaaggaaaaaaaataaccaacaatgtagcattcctgtagtttgaacagttctatatagaaacttgagaatcttttctttctttttgttttttgagacagagtttcactcttgttgcccaggctggagtgcagtggtatgatctcggctcaccacaatctctgcctcccaggttcaagcaattctcctgcctcagcctcccgagtagctgggattgcaggcatgcaccaccacacccagctaattttgtattgttagtagagatagggtttcttcatgttggtcaggctggtctcaaactcccagtctcaggtgatccgcctgtcttggcctcccaaactgctgagattataggcgtgagccaccgtgcccggccgagaatcttttcaaatgaaatatcaagtgcatcctttgaactgatgcattatgtattagccaagtagagggcacagtaaggatgttcagtgtctacttcaagttactcctctcacccccctccacccccgcaatccccagacatcttgggaaaagagtcattcagcccctcatttggggcgtgctagttctgtagacagtgacagaaaagctattgcacaaccaattctggatattgggttcattcttgtgccaaataaattttggttaagggagtatatgtggccttcaggtgagggaaggagaacctgcgtaggggctgggggctcagagtcctctcctcctctgcctccccgaagagccctggagctggtggttgtgcagactccatttggcctgagtgactgctcctgacagtgttcagccacacgccgttggactgccgccagaggcctttggaatcttggtcttagctgctgccattctccctgctgagggctgggttctcagcagggaacatgcagaaggggttagtgagtgtgtttgtgtgtgccttctaattcctgtgtttgcttctgggggactttcctattttattgctctgactggaaagaaaacagggcattatttctgtctccttaacttctttcttttgaattttccagttttacttttgttctttatgctgggttaactgtgtgtctgtctgtctgacttagacgtaccctgcatactctaaaacttcctgccagggacagctgcttgtgacaggagttctgcacagtcctaagaggggatgtcatagtcttctctcaacatgggggtcagacccattcccttgaacttaagaccatttaagttcaaatccatgctttttatttagcagctgtatggccttgaacaagttacctaaccacattatacctctggtttcttcttgcctgtcaaaaagaaatagtaaaactagactagcaatctctttctctctctcttttttttttttttagacggagtcctgctgtgttgcccaggctagagtgcaatggtgcgatctcggctcactgcaacctccacctcctgggttcaagcaattctcctgccccagcctcccgagtaactgagattacaggcgcacgccaccacaaattttttttgtgtgtatttttagtagagatggggtttcactacgttggccaggctggtctcaaacttctgtcctcaagtgatccacccgccacaacctcccaagtgctgggattacaggcttaagccactgcgcctggccaagactagctctcttattgggtcactctggggatcagatgtactaatagatgaaaaatgcttagagtagagtgaaggagcatgactagcctacagtatatgctccatgagtgttagtgattactattgttgaaatgtttgactagactctggagatggttctgttgttttctgtggtgaccatattagtcgcattattgatacggacttaatccacttttccccagataataaataataattaataaatttctaataataaagcattagctattatttttacatgtttttatactttttatagtttacaaagtgtaaatcctgcaatgtagtaagcgtggttgtcatctcaatttttctgaggatcaggaaggataagtgactgctagtaagaggcagaattaggaactgagctcataccatctgcattgtaggactctgcagtttccatttctccagagctgtagtattttctttgttgtccccactctttggtcccagagtctccccaccagtagtatcctcagcctagatcagtgtttttcaacctcagcactatctataattggggccagataattctttgttgtgtaggaggggcctgtcctgggcattgtgagatgttttgtagcatccctggcctctacctactagatgccaggagcagcccccaattgtgacagccagaaatgtctcctgatgttgcagaatgtcccgtgagagacaaaatggtgctggctaaaaacccctacccggccgggtgcggtggctcacgcctgtaatctcagcactttgggaggccaaggaggaggatcacctgaggtcaggagttcgagacgagcctggctaacatggtgaaacccggtttccactaaaaatacaaaaaaatagccgggcgtggtggcgcacatttattaattccaactacttgggaggctgaggcaggagaatctcttgatcccgggaggcggaggttgcagtgagctgagatcgtgccatggcatggctgcccatgccaggttgggcaacaagagcaaaactccatctcagaaaaaaaacaaaaaaaaccctgccctagattaaggaaggtggaagggaaatgtgtttgtgggaggaggggaaaagtggaggtgaaggttggctatcatttattgagcacttactgtgtgtcaggcaaattgcaaacgttgtctctggtttaccaacagaaatcaggattatctgcattttcagcaaagaaggactagggctcagagaaataaaactctatggccatttgtaagtggcagaagagagattcaaattcaggtccacctggcagcaaagcttaccactttcccgtcacctcctccacacaattttatgcaggctcatggcattttctttctttttaggaaccaagaaaacccacacagtgaggattaaatcggtttcaaagttattttgaggctgttcatatggtgcatacctgtaagaaacaaaacagaaaaatttctttgcagcaaaattctgagtaagccaagcattattttattgagaaaaagagggttttggctaaattctagtgtaatcaatcatasttgaacttccttagatcttagacgagtggcaaggtatgtgacaaagcataatttcatcgttgtcttccaagtatttcccttttggttttctgtcagactggtactaatgtggttttcaaatagatatatagtacataagcaacgaatgtgtgtgtggatatctgaaatgaatgtgaatgtgtgtatctgaaatgatatacatgttaatgctcctgttttaatctactctgtgtgcaggaaattcgatcagataaaataatgtcatttattagtgtgatagttccttttgtaaatattatgggaatcccgatagaagatagaagtgaaatatggaactgagtgagttgatgttgagaaaaactcttcaggggacctcaatattgcaaagcaattagcttcgtctacacatgactcccgagacctgttctagcatttgttcacttaatgcagtttcatttctgatgcctccacgttcagatcattaataagcagttagatgtgtcggcctgttaagtgactgtaagagaggatttatttgaacactggcataagctatcttagtatgtcctagaaaatagtgatagaaaacgtgtttaaaatgtcatgcaaaacaacctatgagatatttttgaatatattccttgtggtgagaacacatattatcaaaatgaaatgttggtgttgaacgtgtcatggtaccttatgaaaatatgacagcacttcccgtggtaaaagccagtcccaggaataacttctattgctggccgtaagcccagacaggtgtagctacaacacagagtgattagtgggtcctgagtcttactctctttctaaggcccaaactatcttgtcaaatttaaccatatcttgaatggaatcagtgtttggaaagttataaccgtgagttaaaagcaagagaattacaaagttctgcacttctcaaatttgagtaagtaggcctgaccagagcaaaccctgtgaccttcccagactaggaaacaaatcagggagatggaaaatgagaatttaaaaagcggggggggtttggtgagataatagtaaacatattaagtcatttacatctcatttataaagtctgaaaggattgttgtgttttaaatttcctaattctaaggtgctcagttctccctctcctcatggtatgggggaaggagtaaatgaactaatgtctattaagcactttgcatggtccctaacacagtaggcgctcagtaaatagtaattactattagttcaggctcttctggtacaactttgaacacactgccaactaaaagccactgccaaagttctgtgagagtgaacgaagacttctggtttatggtaagcataaacacacacagcctgaagatcttaatgcattaagtacttaacaaggtggagtatttagtaaggacctgtgcaaagggcaagttgacagagttctgatgctaaattaactcagcaaaatgggattacaggaaggttaggacaataacaagacattttttatgttagggtgtctcagacatcaatgtgcgtaaaaatgatcaaggggtcttgttaggatgcctattctgattctgcatttctggggtggggccaagattctgctttttttttttttttttttttttgagacagtttcgctcttgctgtgcaggctggggtgcaatggcacgatctcggctcactgcaacctccgcctcccgggttcaagcgattctcctgcctcagcctcccgagtagctgggattacaggcatgcatcatcacgcctagctaattttgtatttttagtagagatggggtttctccatgttggtcaggctggtcttgaactcccgacctcaggtgatcttcccaccttggattaagtgctgggattacaggcatgagccactgtgcccggccaagattctgcattttaacaagtttccaggtgatgctgatgctgcttgtccaggaccacactttgctgagcaaggctttattaaagactcaaaaccaaattctttcccccagcccttccttttgtctcctgcctatgttcagcacctgtttcatatgtggtcagaatagcagagtttctcacaacccagctccagccctcggccaggatccctggtgaccccggcaaacacacacttctttagggtcacgggcaggttactgagtcaagactgccaaagcccaacaatgatattttccttcactccccatcgtcctccctctctagccaccccaaacccgggactaatcttggagctgcttaataataacaaagccagcagcagagtaaggcaagatttcaaagcagagtttttcttgtttggcaattacctaattcaggatgcgattcacagatttgcaaaacccatgtgtgtggaaaccgtttctcctgaaagatgattaaaagcagatcctctcctgaaaaggcgacataaaaattaagtgagtgacagtatggagtcttcccgtgccccaaatgtttggatgcatataaattacattttactaaaatgtctacacacgagttcatacacgcatgcgcacacgcaaatagcggagaatctggttctaattacttgtactttagttgaactttggcgtttcctttgaatctctccctaatgtatgtgagctgtaggctttgcagtcctgcagtgaatccacagaaaaagggagaaaaaaatccagataggctctctttggtgccaacacaaatgaagtccaaacgaacattttgaccaaacgcaactttgctcttcttccttaattagctgaaattactcccttccactgggattcggagctctgggctcaaaattcccctggggccatgcaggaaatgtcttttgctttataactcctttttcttttaaagctcagctgcccagagagtgcattaaaatactgtcttaatcacagaaggttctagtaaaaaggctaggctttcctaatgcatgatgcctgcctgcctgtaatcaggcccaacctaaaatcctgaaatctgtcaacatcgttttagccagccgtaaattagctctcacaaagaaaaaaaaaaaagtatactgagctctcttaaaaatgttatctgctacttaatctaacctttagaaaaatgccaagcatgtaaggaattgtgaagggagctattgtcgaagactttctgtgtgtttaaatgacactcaggtgtgttgtaacaacaaggacatttatactgtgttttctcaggtgagttaaattcgtaagtgccaagtcctcttaacaggcagcaatgttaatttcttttcttttgggaatgaatcaacccaagagctgtggcagtgtttaagaaagcttcgtcagtgggaactcgggaattctgcttttgtaccatcccagtcggtggagattttgtttagctttgtttttgttttgtctgcaaacaacctctgagtttgaagtccttttagaggactgtttctcaaaatgcaatccggagacctgtgcccgtccgcaaggagagaagttcagacattgagagcaagtgtttcaaaacttttggagcartttgacagggtaattttatgtccattaaatctaattttttttaaagagttggagcttgtgctttggacgtcgttgtttttccttaactcctatttcctggagattcatttgtattgaatttgatcaatccatgagggattgggggaaagactaagaaatggtgcttcaccrttgatagtctgaaaagcacgaatttaaagcaaatgtccttctccctaacctcaagaattcccctgctgcaggccacactttgaggaacattgatttaaaagcaatgagtcccatgactaatttattgtacaaggaaggggattctagctttgttttccttagtgatagttatctgtatgttgtgggggtggagatgtctaaaataggggctagcagcttccgaggacaatgctgcagatttggttcattctcatcttccctgaggctcactgtctccactcatgtgcgcagttcagagcagccctctcagcatcactggtgctgactgtgctctgggcggggacccacagagccaagcatccatctcacccgagtagcagaagttcctctgacttgcccattccctgacgaagcagggaagcccatctggttagcagtttggatgccacattggaggctgctgcttgttgggcattcaagcagcaaacagaactgagtaagtccataagtaggcaaggaaataaataaaagcaggagacaaaaagcagatccgaattattcctctaagactgcttctccaaactgaaatcacatcaggatggctgcagtgtagttgttttattgaatgacacaagcctcttttccccctgggaagtctaaaaactgcttttttggcctgcctgagatcgctgaatgagctaatacagaacacattgtctgctgagccggcagagttttcaagcaaaaattttatcattccatagactgattgtgcttgcctgcaataaggaacaaaatgtttgaggcctctcaagggcatttgatgaatctaactctaatttaaagggactaatagattattgatttaagcaggatgacagtgaacagatcaatggctgagcactctgtatctgccttaaataccaaaaatgactggtaaaaggaaagccatgggctgtccccctgcttatttcccactgactttcttggggggtggaggaaggcaaaaaaagaaaaggacctctgataaactttgccaaagtatgtttttgctaccttaccaaaaaggcaagagattgcattaaagtacaaatcttttatattgatgccatatcctggtttcctggttgtaattctagaatttgtcttggcatgttcgcctgaggctagctttggtgatctgacagactataccactgatttttttttttttttttttttttttgccttgcattgttctcagtgttataggccacatagaggaaataaaagaccactgaccatcaattctgagggtgatatttgaatatwtatatatatatatatatagagagagagagagagagagagagagagagagagtcaaatacttaattttttactaccagkgggaaaatttttccaaagatgattttttttggggatcgtacataacgtttttccctttctgtttttgtggcatttgtagcattcaaattatgttcatttatggcatttgcaggattcaaattataaaaacagtagaaagaaccaatttatcatttaaaaacatagcccagtcacttcctcttggaaggctcccttgatttctcctgggataaataaggcctatagttcactctgacattatattagtggttcccaaactacttcagtttggattcgcctgggaatactttttattatttttattttttgttttgtttttctgttttaaatcttacagtcagccaaaagggaattttttttaaaatggcaattcctagctccattctcagacattctggcataatagatctgggatacaacttggtcattaggacgttaaaaagctccccagctggttctagtgtgcagccaagtttggaacccactgtattatcattgttggtttattctctattaggccaaatttgtcaaggataagggattatgtactatcattgcccatagcgtataacacaatgcctggcatgttatgtcactcagccaaacaaatgattgaacacatgaacagtctgagaatctattgtactcacatgagaaagttcctagaattattggtgaaatcaccaccacctaaataaaaggccagggctctcactattgattacttacaatagaacattttcgttcatggcaactgttcaggaaaagccttctggattcattcatttgttataaatgactcttatccataggaaaagatccaatctttgtaaaatgctttgggatctttaatgtccagtagacttcccgttttttgtgtgctttgccccaagtttcttgggtattaaattatgcacaattttgtttcctktctttgggaaggtgaaatgctggactcccttcagtgcatgtgtttgaagtggcatatttatggaaattactacccacttttgaaattcagggcatagctctgacagctgattccagccctaccagaattctatttacaactttcctagacaggccagattagctgttctacacgaacgagtaggaccttaaaacacaccgctccccaccttccttctgtgaagaactcaatgcgagattgatcatagtggtgatgacatgactctgtcagttgttgaagcacatggatggaagtagaagcacacaaatcaaaccactccaaaaggtttgagaggcatctggggaaggggtcacttacgttgatatcagggagtgtaaatctacacaacctttctagaagtcagtttatcaacatgcattaaaaacaaaatatttttaaaataacaacctttgaactgataattacacttcagtaatgtatttgaaggaaataaagatgtggtgagattagctacaaagttgttcatcacaatggaatgttttctgtgaaaaatatttatcgacaaggaaataaattgatgacatcataggttaaacaaagtcctcagcagtgtcagtataattccaccttagtagacaaacccaaaacatttatgtgcatagaaaaaaattctggaaggtcgtacacagtgaatttctctgagtgaaaagattgtgggtgagtgattctgtgtgtatttttccttagatttttaatagacagtgatacattgttttctaattttaacaagcagtgttttcttgttaattcgctttcagtgaagctgattagttccgtgtgaagaatgcttttgcatctactgcttgatagctgataagctttagtgacatctcagataccagcccttctataaaacagttgctgccactgtgccaacttattcaaagcaagggcttcctatctgccagaaataatgtactcaagattgatatcttcatcccagataccttggttctaaccagtaaagactataatagatttatctactaggacctgtactactcaaatgaattcattccaagattcttctgaattatgaaaatactataattatagttgattctgttccaaagggctaattaattacttttttaaggaagcaaaggagtataagagctatttggtttctaattttatcatttaacaacttagagggactcttagtgctcaaaatgaggaagaaaaaggaaaaggaaaaagttcatgtgctaattcaacaaatatttattgattatctgccatgtgccaggacctctactagtcctggaacacagatgtatacaatgcaggtgagtttctttcccttatgaaactcaatatttagagtataggggatggcagatgtagaatataaaattatatacaaacatctaaaatttgaacactggttagggttttatggaaataaaatagtgagacagagtgaccaggaatggagaggggcattttaatgagagaaatcatctctgggaaggtagcatttgctttgtgatctaagaaacgaaaaacaaccagatatttgaaggtctgagaatatctagaaaggacaaatagttatcacaatagcctcagttggtatgagagcttggcctattcagaagacagaatagatgccaattatatagaactcaataaattaggggactcactgaaggaaatgatgctgctaaaatgccgtgtgatgaaaagtcttgtagaacatactaaggagtttgactttgatctaattggtgactattggagggctttagataggcgagtgaaacagatggattttaacatttgaacaactatcttgactgcttgtttgaagaatagacactaggtaggaagaaggggcatgaagtgaccaatgaagaagctattgcagcagttgtgagaggcgatggtggattattagcatggtgtggtagcaggatagtgatgtggggatggattaacaataagtttagtgggtagagttgacctgacttgctaaaagcttgcctgcaggataatccagtcaggagaatatctactctgggagattataagcagtagggcaactggaaactttatattctgggaaatacactgtgtattaaaaagcaatttggagactagaagattctggaacattatttaaccacttttaattctccttcccgatttccatcttattttatgagcatatttacctgtgatagaagtacagccagttcttgctttgattctgagtacaatcctggagaattaggggtaggagaacaccccgttcttatattttgtgaactcccatttcccatggaatttgggtggttagataacaggatggaggattattatttttttaatctagaataaagagtaacatgacttaaaagtgaatcgcaccactctgtgtcatcattagttttaacctactgcttctcaaatgttaattgtacatttagtcatctggggatttcatcaaaatgcagattcagattccacaggcctgagctgggacctgatactatttttctaataagatcttaagtgatgccgatgcatgttggcccaaggagccttctttgagtagcaaggatcttacccatattgttattaatgaagatcagttatggctgcatcatgctaaagaccctcccagtacacttgttgaatgaataatttgggcattttcttcatttgtccaaaggaaaattttaaaatttttatttatttatttatttatttatttttgagacggagtcttgctctgttgcccaggctggagttcagtcrtacgatttcagctcactgcaacctctgcctcctgggttcaagcgattctcctgcctcagcctcctgagtagctgggattacaggcgcacaccaccacaccttgctaatttttgtatttttagtagagatggggtttcaccatgctggccaggctggtctcaaactcctgacctcaggtgatccccctgcctcagcctcccaaagtgctaggattacaggtgtgagctacaaagaaaatttacttttggttaagtgagcaacaaggtcaagtcgtttgagattctacatgaatcagaagctactggggtttgtagtatgaytatctgaatttgtgtcttggctctaccactgctctgctggtcttagttagacaagtcacttccttcctttgagtttctgtttctgttgtggctaaaattgtgataaaaaccatggccctcacagttctgtgtgagctgtggactgcaagtgagagatgtatgagactgctttgtaaaccgtagagtaccacatcaatgtcagtgtcaccactgctgggcctacaatgacagctgtttttatgagcccattcttgctagtgttattgctgaatttggggcagaagcatatgaattcactgttgaaaaaagtaatgaactaaaatacattttctcttttttctccctctaccccatctstattatagcaattgaaacacagagcaccagctctgaggaactcgtcccaagccccccatctccacttcctccccctcgagtgtacaaaccctgcttcgtctgccaggacaaatcatcagggtaccactatggggtcagcgcctgtgagggatgtaaggtgagtattcacacttctrtgcctgatgaactctcaktctccatgtactttatggaggtgacctacccagttccaaaaatgggctggatgtgtaacatcacctcccataagtgtggtgaattcagttatattcagtggtttttattacttccttatatatctttggtttaaaattcagaaacttctgcaaatgactgatgagggtcaaaggttctaaggcccttaaattacccccacataataattccttttagataataagaactggctaggccaggtgtgatggctcacgcctgtaatcccagcactttgggaggccaaggtgcgcaatcacttgaggttaggagtttgaggcccgcctgaccaacatggcaaaacctcatctctactaaaaatacaaaaattagccaggcgtgagtggctggtacatctagtcccagctactcaggaggctgagacacgagaatcacttgaaactgggaagcagcggttscagccagccaagatcacaccactgcactccaacctggacaacagcgagactttgtctcaaaaaccaaacaaacaaaaaacaaagaactggttggaagaatcttgaaaagcatcgttctttttctctttagaacatgccgtctggtgtctgtagttttatcttatttttgaatatgactgacagtccactgaatcaacttgcagggaattcaaggttgaaactgggatttgtctgctggctgttttcctcagctctgtggcctttgaattacagtttgattttcagcctgtagggacttgctactgtatgtgtgtcataaattcaggggagctggatttaaaattcctgcctacagaatactggaggctgaacatgtgtcagagagtagtatatggctgctttgaatcaagcaagacaattgttttcaagtccaacagtcttaattgagtgaaagagcttcttcttttttttcaggaaagaaaagaaacatgacttcaaaggcaaatacaactaactcatccataaaaaatttctcaaaggaactatggctgttttgaactagcccttccctagatatataacttctttaagtcctctctggatggttgtttacatctgttgtttatacatctaaattgcatgattcatttgtaattgttaacatgttggaataatgttacaggtactccatggcattttatatttggcttagcagagttagcacttaactgtatatattggtcaggcactgttgtataacaaaccatcctaaaactaaatggcttaagacaacaattctttatttagcctgcaattctgtgggtcagcagtttcagccaaactcatctgcatggttcacctggacttggctaggctccaccatgtatctctgggcagttgtaggttagctagttggctctgcttctaggggtgctgactgtgggctggggagactcagctctcctccatgtgatccctcattcccatcaggctggccctggcttgttcgcagaggcagggttccagaagacagaacaaaagcacataaggtctccagaggcttaggctaagaagcatctcattactacttctgccacactattggccaaagcaagttataaggtcagcctagactcagtaggtaggaacatcaactcaacttttgttcttcttttaaataaaataaaacgaatctgtcaacttgaaaaagcttttttgtagagatgggggtctcacgtatgttgcccaggctgacctcgaattcctgggctcaagtgatcctcccaccttggcctcccaaagtgctgggaatacaggtgtgagccaccacgcccagccccactcaatttcttaatgggcagagcttcaaagtaataagtgatatagatatggaggggccgggggaatgggtgtcatttttgtaattagaccactgtactgcatgtctgattgcctatgaacacaaagtggttggggaccctagctccactgcccagcatgtcatacatagtctggcatatagtgggtgcttaaagattgaacaaatttggccaggtgcagtggctcacacctgtaatcccagcactttgggaggtcaaggcaggcagatcacgaagtcaagagatcgagaccattctggccaaaatggtgaaaccccatctctactaaaagtacaaaaattagctgggtgtggtggcgcttgcctgtagtcccagctacttgggaggctgaggcaggagaattgcttgaacccgggaggcagaggttgcagtaagccgagatcgcgccactggactccagcctgacgacagagtgagactccatctcaaaaaaaaaaaaaagattgtacaaatgcgtaaatgtcactcagcccctcaaagtaattttgtgagtttttcccttcttttcaaaccatttaaataaacatatgtattatggtttatgaatataataaggccagttttgggaaattcattaaaggcttaggaacatctctctgcctctggaattgtgctattttatggcaattctcttttctccagtagattctgacatggtagtcaggaaagttatatgggcaaccagttggcagctgactaaaaaggaagacatttgttcattcaattattgctttattattagtaacccctagctgaacctacttaaatttatcctgagatttggaaaggtttcagtggaatagctagttcattttgtccacttgttgtgcaatatataaataaatgattttctaatgtttatttgaaaagtaaatgaaaagatacttctttatttctgaaaaatgttaagtcatctcatgtccagaaatctgagtgaggtatgctgtaactcagcgtacctgctctcatcattatccaacgtgtctctgtggcacatactaggagctgcatatgaagctgtttcatgatctgtatagcacaaactgctttaatcagctcatagtcagtgagttctctgagcttagtttgggattctgactcytttttaggaaaaaccccaataaaaacaaaacccataccggcacaaacaactttgataagctcagttaagtgatacagagtcatattatggtgtatctttttaacagagctataaacccaataaggtcaggtgagttcggcagccagttgaatttgataatatttttatattgtgggtggattgctcttctccctggtcattgggaaagacttggtctacatttaagcttgctgggaaaatacagtgacaaaattcacagaactgagaaacatgaggaggtaatggtaaaatacaacagccaaagaaaaagaaayataactttaaaaaaattaaatataattttattgtcatttaaaaaaattatcaatacagtatagaatttattgtataaaaatagaaaattaaaacaaccrttattctaccctgggagggaacccctgtaaaactcagcttttctgtaagtatatgcatattgttattgtttcagaaaaatggaattttgtgttgtatactggttttaacttaatctttaataatattttatgacccaaatttaagcaactgcatagcttttatggttatacaaytaatatagtagtttacggttatgtcataatttatttaactgattaaggtgcttacagtttttttcgattataaataacactttaaattatggcctttaagtatatctctgaaaatttccttaggataaaattttccttaggataaatcagtataagtggaatttttagatcactggctttgtatatttttaaggctttcgaatcagattgccagaataccccgtagaaaagattattgtctagtagtctgtaaaaagtaaatcctttcggaaagtatctattatctcccttgtgatataataaggtaatgaatccagaagcaacttttcttcttgaattctgcctgtatttaatttgatatttactatgggccctgtgtgtggtatcattttaggataccagcagatgcaccataggccccttgttgaccggtagaaactggcccaaccattggctggaaatcaaagtttactactgtaagctgagaacctctgctctaaagtaggactcccaaacagagcctggtatatcttcaagaagtaatgcctacggtggcttctgcctgtcataaccaggatgacctaattgactattatttggggaagagaactttccrtcctcctagggactgggtgacagtctcagcctctgctgcagccatacgatggtggtcagaatttaacaaatgggtgtggtccatctctgggaatgaatggtcagcggctgctgtattgacacagcattaccatggcagtataaccactagacacactgtagggatgccctgtttagggggtttccaggtgagcgatggcagtttttgtgtaggggacaaagagtacacaaaaggaatgtgcagtgtggttagccaagaatgtttaacagtatraaataataaagcaatattaaaaaaataataggacaaaataaaataatgtctttggaaaacagtcttattgctcatagctaaaatttaatgcaaaattttggccttaatcatattttacatttcaacttttgtagcttttgaggaatgtgaagtctagagtgagaatgctgggatgtgaattctagctagactacttataagcttggtgcaactctctcttttctcatctggaaaaatgggggtgatattacctacctcatggtattgttgtgaggataaaatgtttttactatgtataaagcatatagaatagtacctagcacatagtaagtgataagtactaagtggcacatacatgcttagttattgttttgttttgttttgtttttgttgagacggagtttcactcttgttgcccaggctggagtgcagtggcgcgatctaggctcactgcaacctctgcctcccgggttcaagcaattctcctgcctcagcctcccgagtagctgggattacaggctttacaagcatgtgccaccacacccagctaattttgtatttttagtagagacggggttactccatgttggtcaggctggtctcaaacttccaacctcaggtgattcacccacctaggcctcccaaaatgctgggattacaggcgtgagccaccgctcccagcctatcgtttgttttatcattaagttattataatgacttttgcacacagtgatgtaacatcaattataatcttagtactgttcttgtagtgttctttctgcagttctccattcttttctatcaaaataacactgcctctttccttcaaggctcacattaagaccctactactccatggagcctccctggattaccctagtacagaggttgccaaattgcttctgcaaagagccacatagtaaatattttaggctttgagggctatgtggtctttgctgccattattcaactctgtcactgtagcatgaaaggtgctgtagataatatgtacaaaaatgggaatggctatgtttcaataaaactttgtttacaaaagcagtggaccagatttggcccttgatgatgttattcttcttacaacttctaaaactcagaagctggtgccccaaagctctcatgccaaaagtggcaagcccgctggttttgctgggctatgggcctgggtctgctgctccacttccacactgctaaaagaagttcatgtccacctgcccagggctctgtggcttagaagctttaagccatgtctggtcattcctccacccttccaatcacactcaaatcccactttcccatcatccaaaatcagagaaattagaagtatccaggtaattgagctacgtccagaaatacctgacgtcacaccttggagaggtttctggaacatagtctatgctgttgtatcagttagcttcttctgcttaacaaataactcaaatgcttaatgtcttaaaacaatagacatttattattcattataattctggataggtcttcttgtcttggctgacttggcttgggccaggtggtctaggacggtctcactcacatgtctggggccttggcaggatgaccagatcctctccccctgttgttgctcaccattagcctagcctaggcttcttcacgtggtggatgggttcccatcagtaagagaagacaatcaccatacaatcatagcaagccaacgccacttatccagtsaaccagctcaaacaaacacttctcaccctctgcttgtatcacatttgctaatatccccttggccaaacaaattgcgtgacyaagcttggattctatggatgaagaaataaacttcacctcctaaggggagaagtgacaaagtcaccttgcaaaagggagagcctaccagaacttgcatttggttacataccgtcttctattattccctagtttgatgggcaagtctcttctgacaaccttattcaccaatcattcatccttaagcatatgtttgttgaacacctactaagtttcaggccctatgccgggtgctagagatacarcagtgaacatgacaaagttcctcatggaatttagtgtctcacacaagggacagatgataatttaaatttggaaaacaataaacagaatggtctaataaagaataatttaggggtattctatttcacaggggtcaagggggcctgatgtgatgggggtcaggtgggatctcatggctgaggaggaaccagcggtgtgagtcatagagagaaagcattttaggtcagaaaccaaacacttggattctcggagcatttctacttcttctggctatgtccattgacttctctgggccttagcctatctgtaaaatgaaagcaaatccacaagtttgaacccagtaccatgtcaaatacagacataaaagcagtgaacctaataatggcactgatttcttgttagggctggcttacgtggagtaagaggtctccagtgtttgtacgtccaagtgtggagtagagggaagaagaaaactacccttgttgggtgccttctgtacactaggcatttgggcttttttttttttttttttttttttaacccatagcgcttttatttctcacaacagctctgcaaggtaggctccgtgacccacattttatagatgaggtaacagagggtccgagtagttaaggaacgtggccaaggacacacagctagcctttgctagagctgggattcaaatccttttcctgttaaaaaaaacaccccactgcttcagccacacttagacagaaggtctgaagcagtggtgtgttatggtctagagtgggggtttcataggccaccaaatttaaaactaacagataggggcatatttttaaaaaacatattgtcttgatcatttcataaaagaaatgacatctctgcgacaaaaaattaaaaaaggaagcgcttacaaggcagtcagtctttcccaagaagggacagttagcaggcagaacccacacatgggcatgttcccagatgcagctttgtccttgctctctacattttgcctttgatgggtggaaacttcctatccctaagccaacctttgggggccacaatccagcctgtcctgcagaaggccccagggcgaggcctggcacagccgtgatggcgtgtcttctccacaagggcgcagaggaaatgcttgctgaaggtcacattggtagccttctatttaaagcagtcttttaagagtttaaactccactagccccctcagtccctcagggctaattttgtccatttttctcatctgcctttgttttgctagcctctgaagagagggaggccctcatctccatgacagcgttcggctgctgggctgggttttcctggcagacagcaagcagaatgttcagtcacaaaaagttttgcaatcaggaagatggatgtctgcacttaattttagaacttctattaaatactttaaatgagcttaatgattttatttgaccaaggccatttaaaaccacattgttgtttttaattggagtggataaacatgaacatgatgctstctttggagaatatttttagctttcctcactctgatagttgcttctgttttaggggtttgctgcagtattgatcccaaagaacaaaataacatatccaaaacaataacaaaaacaggacactctgtgtaccactctgtgatagctgaatgaattatgaaacctgccataaacttcattactatattggatcacacagagtagtttccctcatagacccaaaaagcgtccctctgttccctgttgctataatctgccaaccatggaggatttacatgtttcctcattcattcatcagacatttattaagtgccttccatgagacagctccaggatatagaaatgaaagttttgtgtatattttttccaatgctgaatcccattgcctaaaaaatacagagaaccaggcctgtccaataatagggatgtaactggctcaagcccagctgctggctgcttggaggcagaaaacatgagaagctaggtgtggtaaaaggatttaaattctggcttttggggaatgaccaggctcaagtctttgaaagaccattccaaactttaggctgtggagaggggcttaaaaaggggaacgtggaggaggggtgggagcatgtgggagtggtgctgggtgcaaggtctgcgtgttcagttccggaggccgtgttgagtcacggtccacctgaagcacagcgtgccatcatttcagcaatgcccgggttgtagactaacccttttgaggtaatctctgcaatttcacagctgggtctccatacctggtttgtttaaaaattagctcctggaacttctaagtaagtgcctaattagataagctagtagttcaagagagtgtctggtaggaagggaggaaaacaaaaagtttttaagtacgttttaatgctgagagcaagaaaagaaaaaaaaagttttaaaatgcaattttaaagctaagctcctcgattacaggtaaatggtaaatattcattggatggatgaatgaatgagcaaggaaacagtgtggcatgtgctgtgacaattgtagctaagggtttgatgggcacagagaaggagtctcggatccctctgacacattcatggaaggcttttatagaagatgtgattttatagatgtgtaagcattttccagatgaggaaggggagaggagtgttccaggcaaaagttgaagatggggctggaaggcaagaggactcagaataaaattgcctatatagagttacatggaaaaatggaaatctatccattctgttaacatttattttgcataaccctatataaacaactagggatccataggatattaaagacactcaaaaggactcaataaataccatttcctcagagaagccttcctttggaacccccaggttaggtccccctcttttacatttgctgttgttcgcctttgtagcacttaacacaattgaaattaagtcattattaccaagtcattattaccaagtcattagtttaatgtcagctataaactccaggagggctgggcaggtctctcttgtcacagccttattactagggctttgcatagtgctagggaggcggcacatagtaggacgttaatgtatatatgcttttatcataagttatatctaattatacagtaattagtgtagttataaataacgcataataagatataattgtataataatgcaaatagtatattactttcatacattttatctaattatataatgaattgcatctaattacatagggcttgggatgatacattcatgtaaacattcatggaattatatataaacaggacaaggtctttggtgaccaaagtctagctcatttcttagtaatttctgccttctacctcagttaaccttcattgcaaaacgtatgtcctctctgatactatctttaggcaawctcttaagaactagtgcctggaatgatatactgacgtggaagagtactgagggctgttagtgctttaagaaaaatctcagcttagagaatctacctccatatcgaggaacctcaagacagctgaaatgacaatctaccttttcctagtaataattcctacggaaggagaaaacacttttcttcttctaacaaattgagaactgattttggattgaaaaagcagaaaaatctgtctttttttttttttccttctggtgtatggataaacaggaagttgggggcggggggagtgaattctgaattagcccgcaactctgcgtgtttttttttttwccttgagttggcgtggtaaaaatagtttatttaayttggtggttttaagaggcttataaattttttaatggttaaacgttcaggaatgcttgtgtagatgcttacttygcttgttgtttgaaaatatctagaacactttcatttgctgtttttgttataacaaactaaaggtctgctattattgcaattatcctctttgtttctccaccttttactagaaaagttaagagagctttccatatttccttctcctgggtggatgcctgtaaagaggtgatatgaaatgaaattgtctggaaaggctttccttcttcatcagcccccctctaccttctcattgtcagggcagggctcagagcccttggtcttcccactctctacagttgcctctctccccacccgcgtacctatgtaaaaccatggaaataataaaactgtcttatatcttacattcctatagccttagtgtttctaatgcattttcatgtatgaaattaaattaagccaggcttagctgaagtaaaaggaaacccccacaaggtacaatgtttgctacaggacttttttctcacatcagctcttgactggcagccttctcttctccacacagtgattaggactcctgccagtgctgcagcttgtcatcctcttaggttcttagcatcatcttattctagctactggaatgaaaagagagcgtgggggaggcagtacacctgcttcttaaaagccccggccaagaatggcatacctcattggctagaatgggacacgtgaccaaaaccaactgcaaagtcgactcagagatgtagtctagccatgtgctcaggtacagacctacttttagggaaagaaattatggatttggtgaagagctaagtttctaccataggttttttttatttgatcctcatcatatttagagaagtaggtggaatcgattgtttccccctccatttcacagatgaggaaactaagaatttatgagagcagattctaccatctgtggttttgatttataatgtgattctgttactgaaatggttactgtgagaacctccttaaatacatttctgtaaggttccctgaaatttatcaaactatcttttcaaggcctctgattctaaacatccccatattcctagttcattcagctttgacattttgagaaactkggaaagccttacccaatagaggtagacctttatcaggggttagattccagtgtcatcacacaaggcaaagattacacgtagacaaaattaccccagaaaatccctttgaaaagcacactgctggagactgacatatgtctctcattaggacctacaaagccagttcttgccatagctctggaaacagatcactccatggaacaccagatgaaacagttgttttctgttctcttgttgtatcaaatatgtgtccttaagcacaacagtcataccagcacaacgcaatgcttatgtcctgaaaaccacgcatccctctcattgtcttcttgtcactatctcctaccataatagtttctttgggattagaatttctcttgtgccttttaggaactatgtctttttgttgttgttgttgttattgagtatttttccacttcagaaaggaagattaaatgtgtcatatggataagcaacaccagaagggaaaattttgttctatggaccctagaactcatccctgaaaaaaaaaaaatagagggaaataaaactctgtgtgcatctctgcctgtacaaagctagcattgtctggggtgaaggggaaaagctggggttctggcaggccggccccattagagccttgtttcttgttccatattgaaaagatgacattcctttgctagcagcgtcctgcctggatttctggcascagttctgtggctagcactattgcctggggcatttttgttggggttggttttgttttatttcaaaagcagcaaaatgcaggctttataaatgttcaaggtagaactgtttttataaagcttgtcaccaaacttgtcagtacagtcaaggtggcccgtctgccagggtgtctgcttccttttcactggtgtcaagatgtatgagaaggcatatatatagtgaatttcacttcttaacttgttctcaagtgtttctgaggcagcccttgtgttttcacatgggcttctcctccctctcagggcttcatgtaatgtttcatttataacagagattggtggatttgcaaagtaaatatttcaataagaaaaaagcaagatcttyggtgaccctctcggttctgcttctatggaggtattttctatgtctggcaggaaaaaaaaaaaaamaaaaaaaacctttatcttggctgcaactctgaactggagcgtgtaaaatgtacttctcaggttctgtgagccttaaaataatgagcagtagaaaactctgaggtaggtcagcgatggggagaataccatagttttataaaggattttcatggttaaacaaatttggagaaactagaatgaccaagcaatgttaattctccactgggcttttgaatctgaaaatagcagcaattctaagtacacaacaccaccattcatacagccctggaaagtcccccacatcaggaaaattatccttattagtcaaacccagtagggatcatctgactattcctcagggaaatgagaatttttgtttggatcttacttctctgtattgtactcaaattgtacatgagctatgycacatctggggactttgcgattatggtcatgttttcaataagaaatacttctgaaagctgctgctctaatttatatgtgtcattcctcattaacataaataaattcagaataatagcatgaggtggtggtatttttttttatttttcagtttccagagtcatcctgctctgttaggtgttccttcagctggctgggaccctaagccagtttacagtcccaacacttgctaagatattgtttgatgacatttattctgtttggctctacagtttgtcaatctcatgatttcatcaaaaacgttatgctgaaatgcttgaatatcttttagtatgtttgttgtgttgagctgtgataaaaagtatgaaagttttcattccaataccaaaacgtagaaagagggtatcagaaattaagtgattctgctaattcttgttatttcactaaaatgaaattaaatgtataatttctaattcagttgtattttgctcttaaattatcattttctgctttaagaattaggtggaaagtatgccctacttaaatgcatgtttggtgctaattcttgcctgttgaccaaaaatttgagtctcatgttgtgtacagtatacatacagatatcatttttttctctaagtatttgtgacaggtaagatctgtgcaaaattatgaattacattacaaatcgtaaatgggtcttactgtcctcactgaatatatttggtttttaaacccaaattcataatgcaggcacttcttttgctatgctcacgtgtatgatgtttgctgttagagagttcacaggattgatatcccagactttggtggtttaagatacctaaaagagtatttttgaattattgagtctacatcaggtattcctttgttatttgattatttttatctgtcttatttcttatgagctctgggcctcagaaagaatatttctgttctccactacgtacactatcrgaaatatgagcattggatgagggatggtaakagtgacctccaaggaactaaatgtttacctgtattatatcggggtggataagctattatccaaataacaaagggggggggatcccctgcaaaaaatcactrtagataagttatgttgaagtatattactattaagtaattagtattttagtaacttattttaaataataaagctgacattcctataagaatatataaaacagaatttatataggaaagaaaaaataacagaaaaattttggggcttgatattttgtgacacttacttctttttcttcaagccatctggggagcacagtcaatggatgtgggtaaatgtttgtttctgaatccttgctggaacccaagtcacctctcctctcatggaagtcctctgccatatccacgytgaccaataacattctaaagtaggcttcaagatcagtctccttggctctgcagtgctattactcctgcaggaaatgcatctggcatttgttactctcacagtaacatcctttcttccattcacagttgaggccctaactcttcccattttagttatggtaaggccaggttatgctgcaggaacaaactcaaaattacaatggcttcaaatagtagttgtgtatttgtcactcacaccatgtgtccattttggatagatagttctactccatgttaccttcactcaaggaccaagactgatggagtcacctccatttagaaaatcactggcccttgaattaaggggaagaacaatggagaattgcccacttgcactggtatctttctactgaatctcaaacacatcatttccactcacaactcattgactaaagcagtyctcttggcctcacctaatccaaatggagtagatgaaaatgcaaacataccatgtgtctagaagaaggagaatgggcagttgccaatgtttactcctttcttctgctctaagaattacaatgattttttgttttcccataaccatgtggttctcagtgtacttgtcttgcacagctgcatttatatgcactggataaagggtcccctccccagcaatatcaaactctttggggcccttaataagaggtttatgtaaaaccttttgagtagagatactcttatttggctgtgccttctatttttacactccattctctgcagacactttttacaagtttcttaagaatagtttatagggtagatttaggaaaaaaaattgtgtggcaccccaaattgcctccctccaaactgaatatgatcataacgtatctttcattttatctttctacagtctcccctgcctttctgggacctccccaagcagttaaagggcacctgctatccttgtctttatgtgagagacccagtcgtgggcctacaactgtcccattctgtgtaaacaccattttttccacartggcttgttgagtcttccctggagtagaagtgctggcagccatcctgaggttgcaagtttcctgtagtggaactttcattgtggtactgattactatttgaaactctttcatgaatagtttacttagtcactgtttttctctcccactagtgtgtaagtgctatgagaataggaactttgtaagtcttgttcacttctgtattctcagcacccacagcaaatcttggcatgatgtaggcactcaataaacgtttgttgaatgactcaataataaatagtatgtagaagaggtgggagaaaacacagaattagagcacatttgtactagatccaagttatcacaggacaatagctatggggcaaatggaggagatgtttaggatactgttggccaagtatgtcctaacagatcagaaaggaagaatgaaaatgtcaataggcatcctttattcatttcatttttagttctaggaaagtaaatgctcatctgagattcagaggtatgcagaggtgcctgccccatctgtcttgctgtatcttcctagctgcctattgccatgctgctcttgggcatggggtaggtgactcaagaacaacattggggctcagtwtgccacctgatgagatggctttttggtgtctgccaagggtgactgtttcctttacacaatggttgaacttatcaattattcasgttacttcttagccccaagttgaactggttttgggtttcaaatattggtctttccctgtttgtcatatacaacagtgaaataacagatgccttctgttcattttgaagtgataaatcctataattactacaagtacttgcatactgcagtttattgaggatgtacatatgcaacatctcctttttataacagctctattatgtaagtaagacagagagtggaatcccttctcccttagggtttaacttctagaataagcatatgaggtaaatattgtatatggttaaaatgacccttaaatcacccaagacgtgtcccagttaccattgctgtataacaaaccatcgcaaatcttaatagcataaaacttttttatttggctcacagattgtgggtcatgaatttatgtaagcatagtggggatgatttgtctttgcttcctgctatctggggcccagctgatgacagtcaacatctggagtaactcagtgtctggtaggtattggagttgtcttcagttataggtctcgtagttggtgttgcctgctaagtcctcagctagaactgctaactggagcatcaatacaagcagcttcttgatgtggcttgggcctccttacaaaatggtggtctcagagttgtcagacctattacatgggggctcagrggtccaaaaacgaaggttgcagaggacaaggtaggagccacatggccttttattycctagccttgcaagtsccatagtgttcctcctgtcaaattctattggttaaagcagccacagatccatccaggyacaagaggaggggacataaaccctcctttcattgggatagtgccatagtcactttaaaagagcatctgggaaggagctattattgtggccatctttggaaaatccaagctgctgcagactgagtttagttttgaatcacaggctctttcttcagttagatgccagatgaagcaggtggcttgttcttgagagcctgttgtaggaaaaatatgcatctctgtgccctcggaagactagtggctcattctgaaaagcagatgggaactgagacagactgagggagctgtgggttcccaccacccatcttgccctacttcaggggacacactcactcagttaaayggcrgatggacatgtggctaccacccacctttaagctgctgtgagtgcgttctggctttcctggtgactgagaaaaatgcagtacccttagtatcgacatgacgtctatggacacagggagaaaaagaagaaatcagaaggcccatgtgacacctggctctgccagctttatggaaacagaccgcaagctgatctctcagggagtggtctcaagttcaggccccctgctttctcctggcttgcatcasatcatatcactattctcatattgattctaggccactgggtgaattttttatttttaccaaatgtgggctctaatgtaagctgctccagtccttgcgttttcagggtgctgcctgccaaaatagttatttattccttttggggagagctattcctgtgcatggtcagggtggtgaactcctgttgactctgaccaaaattctctttggcctccatttggaagtcgtctatgggcctttaattgtaccctctggkaagggagaargagcacttgaaacaggmatgaattctgtacatatttctaaggctgggctgttttaaaaatgttgytgtctgtctgtcttcttttttttttgcctttgaacttggatgtgaattttcgtgaagtacagtgtgtcaagggaagggcaatgagaaaatatgcaggggtatttacttaaaaactactcagtgaatctgtcatggtgtgttcattggtttcagtatggtaataccatattatgaaatgaaaggtgtcttactctatgttaaatggctgctttgtaaaatctcagccttgttgtgcatggtattatgcagtccatgcctgtctctgaccatgaattttatttttcttttttacatttcaaattagattaaaaccccaaaagctatttattaatttgttcctatttaaaatttaaacacaaaatgaaatggaatgtgctgaattttgttcgaatccttataagtacatgtgatgacttttgaaagaattgaatttcatggattttaaggagatctaaagaatgatggaagtgtttttgacagctctgaattgttactttgttagtcagagttgaagacttggaagtcttcaaatctcatacttggttcaaacatttcattaccacctaccaaggctttattatctctcataaaggaagtggattatcactgatcacagaaacaacaggtcatgttaattctactgcatctttcaacccctcttctactggatgtttttgaataacagccacatggaagtgaaacagactgataagacttcctccctcctcttgctcccatgcatacattaccagcagtgcaataacgaggaagctggaaaagaacttgaatgacccacaaaatgcccattacccttgaataataataaataaaaaacttggttatatttgtttggaagtgagagatttgcatatttcacaacagactcaattttgatgaggcggaatattgtagaggtgtgtggattctgcttttcctattactggtatgcagccccttagcctaaaccagtaatttccattggattgggaatcacatagcctgggttcaaatcttggctccatcgtttggacaaaccactgaaatccagtttcatcttttgtgtaataacatrtgagcactggaataattttgagaagtagacagtgtagtatatacacagtgcttctttagtgccaagagcacgtatctagaatttgctatattccagacccatgtttttaactcatttaatcctcataacagctctataaagtagwtgctgttgctgcaacattttccaggtagggtgtagcacctgggccaagtctgtgaacctcccggttacttctctttccctttccctttaggaacatgattttctgcctatgtcatgggccaggttaggttcaaatggtagctaaggtaactaactcccatctttaacattatctgattcactagtccttgaaagtatggcaaggatgcattttggtgatgtttcatataattctaaaggtgagagtcaatccttttagttgtgtttagataaaaagatacctgatcattttcttcagaaatcagcccattgagaagttgttatttattttttcttattagagttaatttttattattggatttgagaaaccaggtgctttattgggagggcagggcaggtaagtaaataatgcaggctgatttgttacagtagagggtggtggggagtgtagcaaagatagtagctgtcttctaattctttgctactgcatgcctcaatggagtacaagcttataatgatgagaatcacctggatggcttgtcaaaggatcgattaattgatcctatwcccagagtttcaggttcagggggtctagaaatgtgcatttctaacaagctcccagggaatgctgagtgctagcccaggaaccacattttgagagccactgccctacaggaatgtggaactagcactgccaggtttttcaatatttcaagagaattcctctattacttgaggattatggctttttcaaggtattttttggttctccagacatttcactactaaaaaccactcagatcatacaatgattaggcaagaaatattaggaaagaacattaagtcaatctcttgcatattttaaatmtattctttaagtattggcaatgtatttaaaagtttttaaaagactgtgtcggccaccactgagccaaaataaacatgtctgttagctcaattcagtttggaaattagcagtttgcaacctctgccttaaatgccaggaagaaataatggatgaaaataaaagaattatgttttttgaatttttctgcrtttaaaaawttttgaaaaacactggccaaatatttttaaagctagcccagaagctagtccagaaatgtgctttccttttataacctaaaaggcagatccataaactgttagaattaacagattgttccctcggttaagcatgcagagcctgtctgttatggtcactgaatcagcctatcagctggtggcaggcatggtttgtgtgaatgatcctagcaggacagtgcttctgtgcatattgtacatattgtccctgtggtacattgcagatatttttcctcttcacctacatccaacttaccttctttcctggtctcaccttactctttgtttttagctttctttgcaccttttaccacttccatttgctttgtgaacacttctgtctgtctttaaaggcagtaaagactagtaatcataataacagcaaatattttttgactgcttatgctctgccaggtactgttttaggctattaacaaatttaatattcataacaatcccacaaggtagaaaatagtactatccccatttaaaagacaaggtaaggcacagagaggttatgtaacttgtctgagatcacacagctaataacaggcagaggccgaacttgaacctagggtatctggcagcaggacccaagcccmcaaccactagactacctctgcaataagaagcctctgctttcagctcccttttttttcctacagaacctggctggacatgtggggatgcttagcacatagcagcacataatgctatggaaacagtcatttccactttccttctatattcaagtggtatgtctggcttatcaaacatttgtcgcaataaaaatatgactgtatgcaggctgagacaaagattactgctctttgaaatttctggagttgcctgatgacactcatgtaggatttagttgatcaaaagctttacttgatttggcctttgaaaaataatcattttggtcaatagcagagcatgtactcaacaaaaagtttcaggcatcactgcatttagaacccagtagaccagcactgttcaacagaaatatgctaacaacaaatgcaagttacacatgtaactttaaattttctagcagccaaatttttttttttttttttttttttttttttttttttgagacggagtctctctctgtctcccaggccggagtgcagtggcgtgatctcggctcactgcaacctctgcctcccaggttcaggtgattcttctacctcagcctcccgagtagctgggactacaggcgcgtgccaccatgcccggctatttttttgtatttttagtagagacggggtttcaccatgttagccaggatggtctygatctcctgacctcatgatccgcccagctcggcctcccaaagtgctgggattacaggcgtgagccacccgcctagccctctagctgccacatttttaaaaagaaacaaatgaagttaattttactaatatacattatgtactgcaatatcaaaaattatttcaacaattaatataaaactattgaaatatttttacatagtaatttcatagttagtcttcaaaatttgatgttaactttcacacttccaacacatctcagtttgaatgagccacatttcaagtgctcaatagctacatgtggctagtggctactgtagtggacagaacagccctggatcaaagagatgtgagaattacagccaagcgacacaggcagagaaccccaaaatgtcaagtgcaaacagacatggagcgagaggcagaaatgattcaagaaagcatcgggacacaattgttttaagggaattgactttcaaggaagataatgggaaaacttggggaaattttgctaattggtagaaattttagttgaaaaaatatgtgtacatatatagtcttcactagtttatttagttgaattaacatttatttgaacctagaaaaagaatcacacatactgtggtagaggatgtcagatgataatgagagagaactttggaattatttgaggacaagagtgattccatttgagtgacttaagcttcttgacctctagaccctggttttctagatcagaaagtcataaattttaaaatcatatttcttctttttttttttttttttcactcaaaaaaagagagtgtgtggctttagttcccatagagcttctggttcagatggtgcaaatgaagcactggctttctcagccttgttttggtagcataggaaaacaaaacaaaacccagagataagagcaagggagactggaggatgtgattatgagtaaaacttctgggtgcataatgtcagcagcacaaactgtgttcattctccatgttagttaatggctaatctagagattgtactgccatttgctgatagagcacagtttaaaatattttatcattaatgtgacagggagtcggataaagaaaatgaagcgtgattataaaatgctaattatcgttctcaagtgcatattgggcactcacaaatatttgcagcgtaatttgctttatttattatttcagtttggttataaatgttaattcaattgcagatggtatgttggcaatttacagagctataaagttatttggaaatcctaatattttctaccaaaatgttccgttagtgaaggatgagctaaattaaaaactcctgctctttagagttaaatacattaattggcaagtaggctgtagggatttccagatctgtgctggctatgttaactccttaaaggagggaaagacatgatttctaatttagagtgggaattttctttatgagaaagggcgaggaggaaagaggtstctttttcctaccacccttgtaacatttcttcaaggctgaggttttcttcatgtcctggttcatagcaaaagagacatgcttgaagccacattttttctgtagtacatcaatagtttctgagaccgtgatgttgataattagggtgtatgtgtacgtgtgtgcatgtgtgagagagtgagaaagagaccgtgttttctccaacctcgctgattactacaaaatatacatatgttttagccaggggttgtcaaattatggcccataggctaaaccgggtctgctgcctgtttttgtatggccaagagctaagaatttttttttacattttaaatgcttgaaaaaaaaattaatataacatatgaaaattatatgaaattcaatttcagtgtttataaagttttcttggtacacagccaatccattcatttctgtattgtctatgattgctttcattctgtgatggtagagttgagtatttgcagctaagtctctggcccacagcttaaagagtttctatttggccctttatagaaatctgccaacccctggatgaggatatttaaggtgtagtttacaaaatggaagctttaacctattttttttttaacctccattgtcatatttatggaaacacacgaatkctggagtacaactgggtttaaaacatgacttttcatttttgaaagctgggaaggttataaatatgagtcttagcttccttcatttatagtcatattaataattgaaagaagtgatattatattactaatgtaaataattttgtgtttcacacacacacgatacactcaaaacactctctttgcctccaaaataaggataaaagtaaaaattattttcttttactgtcaaattaaaaacataaactaagctgtgttcctggaatattctatttgtgttaacaattaggaattgtacatagaagcacagtaatatcagaaaatgtggccaccttatataactcgtttggaaaaatgtcattctttactaagaaatactgtgcttaattaattcttgctcctaggaggtcaacttggggcactcattatggccttaattggtgatataaatcctcagaccccagaggaaaaacacattgagtggttagtggtctctggccttttgggtgagtgtgcactggtgccagcctcatctcagagagtgacagcttctggtttcatggcttcaggtctagccccactcatattaggtttaaaggccaatgtgcaacagcaaataaatgcaataacttgtcctggtgttttgcattaaacagtgtgagacaacccactaccttcagacttggaaaaatgtgtttctgtgaactccggttctttgtattaaattatattcattacacggcccatctggagtctcctgccaggccaaaaatcatcttacagacattagcaaaaggaagttaaatgtaattttttttaattgtatacttttcatttccatttattttttcccttttattggagaaagcagatggaaaggaaagcaggatcctctctcactctggttcccttcgggaacagaggcagagcattcctggctgctgctcctctcacacgttggcttgaggtgatgatggggctgtctagattctggggataattgctggaaaggtcaggagttcaatttgaagctcacactggttggggttgtggagtttggagggtaagaacagtgcagtggcttacattgggctttcactgaagtgggttgccacgaattatatttgacagtgtggaaatgaaactcacaaatatcagatatgatgcagttccattttgtgtctggttattgacttgagtattttgctgggagttgtctttttgctggattttgagtcaatgcaaaaagggcccatatttgggagactgggctttctttagctsgttggatcttaccaaaccagccatgtgtcacaaaaggtatagagctaaggcttatgttggagacatgctgagtgtgtgttcctttaataagacacgtggaaatctcaaatatcagtgctagaaggcatgtagagatcatttcagacttgtgaaatggaactacagaaatggttcaactgtttgctyagagtacaaagccagttaaaggaagaaagtagactagcttagagccctttggacttctacttgggtagaggtagaagtcacttmagccaycctacagccctggcagaggatatttggccaacgaagtcactctcccatgcaaccttccacccatccatgtgagcaaatacttactgaatgccaggcaaggtgctggatttggtgctgaggatacaaaaagctagagttatgacaggtcttcaacttaataaactacatcagaacaattctatagtcattatctgtatataccctaccatcatctgccacttcacccaaatgaattgctaagttgctgagtttggaagggtcttttaaattcggataatggtgaggtacttttttggctacattctgatatatccagcacatatatgcatttcctgatgatggtcttcacggacaatgggagaagggctaattttgaatttctaataatgaatccttgtatccctctgtataattttatttcaatcaggttccartcacagattattrattttattatctaagtatattcttcttactctaaatatttttcttagattaggacaaggtttggattaggtcaagtatacctatgatgacctctgatttacattgctttacaacacacctgagacttggagaggagagagaggagggatgctggactagttcccctgctcagtcacacactttctctccttttgtgcygggatggtgatgtgaggtgtctggtgtccctgaygcagtcagctaacagcttccttaagaagcctggccctgtgctaccctcagtsgcgtttgacacagtaatagacacacattacagacgtaaatagcaactccaggttttcgcttccatggaagtgtgttaaagttatgtccactaaatgggttactttggctttaaataatagaccccattgcttctctgttcctcagcgtgcgatgtggtttcacctaccactctctgctttcaacaaagcagataaggtatcaacacaattaaaagtgaaaaataatctgtctgctttgccggtagtgaatgcttacagaacacacactgatacaatagattttaaataatttatgtccggcacttttttttttttttcaatctgtaaatgaggacacctaatgcggaatggtcggcatgatactctatccttcccccattaagataacaagatgagaggcaatgattcagatcagtatatttttggagctttgagcggataaaaattaaaaattaaaagagatgatgttctgaaatactttgggtaagcaagctcataaaagccatttggaaacctgaaattacacattaattcagaatctccttctgaggggctcctaaaacacctttctgttttcttggcaggatgaaagcattacttttgtgtcactgcctggtgytttcacrgggtctattctaatgctcactaaggcgtcatgctctgttctaatgtgcctcttgtagccatctttggtttgaaccaactaaacttcaggtgatgttgaaaacaaataggaattaatacatgaagctttatatcttccctctatagatatgttaaatctcaagttaccaggataatgtgattcatggcttattttccagcctggagggagtggttggtccratctggagggatttattcagctgctataactactgttgacagtatggggaattggccccacaattccccaaagtctagggactgtgctatcccacagaaacaaaactgctaagctgttaacaagaggtggttcagatctttggtggttaaatgtagtttaatcatgatttacgggggcccggctctttttcctacacctgcctgtgaacatctcctaattattcatttgagaaaactctgaataaaaatatcaatcttgaatatgtgtgtgttccgaggaagaaggccagccatgtccaaggaaatgttcagtcctgtttcatctaaggaaaataattcccaaatttcatccacaggctgatgcttaggagagactgaagtgcttttggatgagttcaaaataaacactccctcctaagttatctcttttgtccttctggagaaaatgagaagggtaaatgacgttccatggaatgatcacctgaggaaagcaaaattaggctgaaacacccccaaagctcctagatgaggcttcctggcctgggggcagggtctgacaccccatcttttggagtgggttatagcatcagggaccaccatccgttaacaagcccatcctgggcagcagaaagctttgtgggccagatgggaagtagccactgaggagaaaaatgtaattttgatacaggaaatagaagaagaacagtacagcttttcactcaagatatatgtttcttctgtctaaagccagcaattttggaaaatgaagctaagagtttaaaaataagggctctgtcagggaaaataaaacaggtccccctacatccattaggctgcctttaattgaaaactggagaacaatctaactaattggcaggtacctcttttattacggagactgtttytccccttctctccagtgtaatcaaaaggctgctcctctttttatcaactaaagtcaggtatgaaatggaaaagcagagaggtaacacttaaaaaattaattgtgtgtgttctgttaaatgttctcctacaaaacaacttcagaaagtgcacagcttaaggtctttgaaacagcagcagctccaggagtgtattttcatatagcatggtgcttaggtggaagctataatgtgctaattgcagacaagttcatgttgtttaaaagaactttttcttttgcattggggacctatttaatttcaaatcttggcactgtgctgacataatatagctactttaattttaaggatcaagaaagaggagcctgtgggtgaaatttgagcctattttttgctaatttggaataaatcagtaagttaacattgctgcctgaatttatgatattagagttttaccaatgaaaatataacttccttyttcctttccttgcatataaagtattttggtttaaatttacatttctttgctgatcttccttttcttccttttccttctacatggaatatccatatgatattattctttaattataaaagttgcatatactccatcacaaaaaaagattgttacatccctgcctgcaaaggactccggtttcaaagaagaaagagacacaaagatcaattgttgcactgttgtrkagagartgttccaacagcatatgctggtagtgggggcttggcgggagcctgacccctcttgggggctgtattttggagcatgagcagtcctgaaccaaagaacaaggcagggaaaggactttcaagtcctagggcctgtggaaaggcactgagmagagagaaaacactctaggtttggggggcctgggtaagtatgactggacaaaggcatgagcaactttgaggggcaggtgggctttaaaccatttcattgctgatctcagtgtgtagaggtcgatactcttagcattatcaggcgtcagcctggactcaccacagcttttccatacaaggacagaatycattttgagagctggagcttaagtaatattttctcaataaacttagtgagatttttgcactgtcagagcagtgtctgtggtgaagagaagcagaaggctacatccaataaatccctgttatttttcagttgtcagacttgacttaaatrtaaatgcctgactagctttccttctcccattctcatagactctatgagtttttcctttttactccaggttcrggatggaaccatgtataagcgagaaaaattccagtgagaagattccaacatggccctgaaaattaaatagacttggaaaaaatgcaccaagctctagacaagcatttatttttctgtactaatttaggtccttaacattataaagcaatacaagtacatcataattatttgggtctgtgagaggcctttgaattatgcaatatgcagcatygccatggtgatgtgccttgccgtcaaccagcatgttatgrtagagccatgttctggttttgttaatggccaaatgttgcataccaaacttctaaaagagattttaaaattcatgctctttggtaaagggtttcagtatatwtgagcatgttttggctctctctccttctgcttacctttttctcccccgcttctcagtacagatgagaaaatttaatttgggtccagatgagatttagtaattaatgtacaaagcagctggggtccgctaactcctgggctgtagctgagcagctattttgttgcatttttttttcaataaaataattgaaaatttaaaaacttaaaattcattggcttcttgccgtgttatacttagagtaatcctgataatagatcggtaactatggatttcaccaaggaagggcacaaaataactgacctaagtaatttagaaaacagatgtctttagttggttcaaattctcagaaccagatttaaagaaagcatgtggagaagagcgaaatcttgcattttagagrcttcgtttccccttgtcatacagtttttcttcctaccacatcttaattcaaactcttgagaagagacaaagtagtccscaagatatcatatttatgatatttagcctactgcacagaaattctttgggtaactactcaacctcatactcttcaccttctttttaagtcacctttatttcagtggcttccaagtagtggtcagagacacctaggggatttataatgaactttwagatatcctcttgaaaccgtgcgtagatatgtgtgctgtttcgaaggaaattttatctagtttcaaagaagttctttgtgttcttttggcttctcccactccccctgcacccccacccccaagtcccttttacactacaaaaataaagcccagtagtaaaacataaaacccctcctgtaaggtttttctttctagcttttactcaggtcgtggaatttctcagaggcatcccaaggggatcctgtgggagaatgagtgtgattacagtgaactacttaattctgtctgatctacagtctttaaacataaggtcaaccagaagagaagagagactatccgagactatccaagactgccacgtcctcataaaggaaaaagagattgaacacttttgctgtagatggtattctgtagcctggactgactacataatttgcaggactttatacaaaatgaaaatgcttgtctcttattcaaaaattatttagggctgggcgtgcgtggtacctcatgcctgtaatcccaacactgtgggagaccgaggcaggcaaatcgttcgaggccaggagttcaagtccatcctggccaacatggtgaaaccctgtgtctactaaaattacaaaaattagccaggygtggtggcaggtgcctgtgatcctagctactcggaaggctgaggcacaagaatcgctggaacccaagaagcggaggttgtagtgagccaagaatgcaccgctgtactccagcctgggcaacaaagtgagactctgtctcaaaaaaaaaaaaaaattataaaattattttgaattttaagacagtgacagcagagcagtaaactaagctctgggcccttctagatgcaaggccctgtgggactgcacagtcacatgccctgcccagaacacagctcttcactttttgaagacagtttagcagtgtttacttgccttatgaaacttgctccctgaaaattttgttttgagataattggtcacaaaacctggtggacttgttgcctaccaattaaagtggggttttgataatcagacctatatgatacctggtcatttaagaagtatggtatccaaggtcatgttttggaaatagaaaaagatatattttcacctaaattaaaggacattttatccaactgagtaatctctccttactattggtttccagtttacgttacctagtaacatttcttccctggctcatgttcctctaaaataaagaacattgtgaactgaatacattggcttcacgcccttcctgggacatcatagactttggaagtttagaccttgatgtctgatgatgtgagttcaggttctgagttaagaacatgggccacctttttgttggtattctcagggagttttaattaattggggattaaaaggattgagagctgtggtctctgggtctaacagaggttcagctctcaaggattcacctgacaaaatccaggaaaatgctgtaatcatattcttctcgaaagattagctttacagtgatgatgttttgctaaacctgtaatctctgccttctttagaaccatttttctacgcatattttcaaaattcaggctttcttttctaatagtaagtgtgccgaggaagcttctagaccaagggaattgaaaggagacttttaggcctaaaacacatggtcagattctcagtgaaagaccagaagataccctccaagttagcaggcaagaggtgctatagactaacagatcttatagaagccatggctacacctttactaagtccccagcactgggaccatgtcctgatggggatttattaccttttttttttttttttaaacaaaaataaacaactctcagcttttgcccttgagacaactcagctttcttgtttggagtatggatttgtggtctttttcttttttgtgtcctggagtttggccccatctaacttgacttgttcaatgttcttttcattacatttatgcccaccctccctgcctagaaggaaactcactgtcatcaaaataataggktgtttttctactttctccctccctctcacccattgtctttcagtggggtgaaaaggtcttcacttttctctttctccccccaaattttgctatgaataacttctcagacgttgtcacgcatagacttccactctctccagagggtgttttttgtttgtttaaggcaacgtgtttcctggtttaaaaaccatgtttcccagagtagctgtgatgggattattccacactcacctcctactggcagcatttactactggctggaaatgagcattattggcagctctctgctggcctggggtcacactgcacagagctccagccttgctgcatggctgaatgactacctgggctggtcatttggttacttttttattcagatgaggttagagtcttttagtgagtgaggaaaatatgactaagtaatgcttttccttcttttgctctagaaggagaaattatccttttgaactttgcatgggatagaaattaactctgcaacagcccagttcacatagatgtactttccacaccactttttgggtggattcccctgatccaatgctttttacaactaaatatagtgccaaattgcctttaaaaattttttaaaaagccttaattcctttcttcaaacaatcatgacacattccacacatgttaaacctgatatcaatggctctaaggctaaaaaataacttccattcaaaacaccacagtatgaattctcacaagcaaatgtatgattaaatatgagtcagcagattgcactgttactttagaaagcaaggattcttgggctacattcctgcctagacccaagggcaggctcaggggattaggtatttgtattgatacccagagctcaatatctacttcagatagatgcatgacgaagtcaatgaatcacagcttcctggacaatcttggcagaatataattctgactctagccctctactgcacagaagagtacagtgtctctctagtaaacactttgcatggctttaagatcttccccagtttaaacattagcccccttttccagctgtatcttacacacacacgcacacacacacacacacacacacacaygccatcatttacatctctgccagcctggaccactggctgttccctgcactttcttactcctgatctctgttgcttacccataatattcttgggggaaagcctgcctttccaattctactttttccactagagctgagatcaagtgccagttttcctcccttctaactcctttgaattcctaaggcctttatttgctcagtaaatattttatgtgtctgcaatatgtggatcaggcactacagtggatactttttcactgtctgcttccataaaagttcttatcgcactgcttggtggcatcttacatagtgttcacttgacttactgtttcttctgtactgagaaaggacaggaaccacctttgtatgctccaagaaagcttaccacatctactctaattggcatcgagtgaatgtatcaaaaagtgagcaattaaatatagagatggcctttggtatcatgaagttgtccatccccaagagcctatattgtttagaggttggacactgtcctatactatttggggatctttattttaaacatagaatgtgtatgggaaattgttcagaaaaaactgaggaaagaagttttgtcaataacagtagctgctattcactggacgcctgctatgtggccagactgtgctaacactttgcatgcattccctctttggatacacaaagttctctcaggaggtactttgtcatcatttttttacaggtgaggaaattgaggtcttagtataactcacttaaggtcatacagatagtaagtggccgagtcacagttcaaatccacatgtgcctgaactagacaattcaccaggccagtatctaaaccaacagaaatcaccccctgtggaagatagtggagattattgtgtgtgataacatctgaaaattagaaggtgaaacggggttcatgtgtgaagaaaaaaaatctaaagcaatagtttgagggtatcagaggagggaagatggcctaacccaattccatatcaaaatatgcaggagggagggagatgaaccacttttttccatgtcctttcttgatttgtgatttaagatatgtccatcaagaaaattataaattttatgtatttgggtagagaaggatatttaggtgtaaaaaagacagttatcttgccttttgatttttgcttctttctgcactgtagataataggaatgattggaaacagtggtacttcataccctcagggagacagaagtaatctgagtcagatgtgggcattccataattactgctaatacatgaaccaaatggctctaatgcatatatagccttctccaccatgtgagtttttctttttcctttttggttgtacctcagttctttggtaacagcagtcaaagagcatgaggtaggaagattgaaaaatccacggttagaaaatgcttgactcagtgtgtaacacagatctgtctttctgatctcagtaattggtgttcattgtgttaccggcttaactatcataaacaacagaagtcatgactaatcaagccatggttaatcaagaaaagtcataattaaccaacaagaattaggattaagcaacagaattcattattaagcaacaaaactcaagtttgaccaacagaattcgtgattagccagcagaagctatgatgtataacaaaagacatagtcaacgtgcacaagtcacagccaacagaggccctgactgagctgattccaactcagatcagtgkgtctgctactaacagctgagaaatctgattgtttaattgcgtaaatacaaatgatatcaccctcaaggaatacatttaagaaactaaggtataatccaagacggttactatggctctggttatagctaggacttcatcaacaattacaattacaattgactaacarttgttagtcaacaattattatttgaatatcttctgtgtgttgggttctgtcccagccctgagctattcagctggtgtgtcccagtacaatttattaggtgttgaaaaattgaaacattttcctgccagtttttgcctgaccgttgccttgggtcttcccttcctccatccaactgtactgtcttagttccaggggtgtcatatttggcactgcctggaggccaccttgagtccaccaacttgtcagctcaggttcctaggaaccagcctttatacctatcctactcccctgtcagggaggcatgagtatcggcaaggaaggtggcacacttgatggcactgagacaccttaatggataaatgcacagtgcctattgggctccctgaggctggggccaccagccacaggttggcattcccccatgtcacctatgtaacctctaaagcagacagtgstattgttttagactttaagtatcatccttgaataggtataacatggaaggaaaagcaaaataccatgattgcctaggagaggaagcatccatgtatgcttagatcagtcagagaaggcttcctggccaagtgacctcatagaattttcctgggtttactgagaaaaggaagttcccagaaaatgaaagagtamcattacggtgtcagcagttccagagttggtagcagaaaaccaggtgttgtttttttgtttgtttgtttgctttttgagacggagtttcactcytgttacccaagctggagtgcartggcacaatctcagctcactgcaacctctgcctcccgggttcaagcgattctcctgcctcagcctcccgagtagctggaattacaggcatgcgccaccatgcctggctaattttgtatttttagtagagacgggctttctccacgttggtcaggctggtctcgaactcccgaccctcaggtgatccgcccaccttggcctcccaaagtgctgggattacaggggtgagccaccgcgcctggccgaaaaccaggtcttaagacttctagccacaatctcttgggatagtattgaaacattccaacttcagtscagcacagatacctgcctgaggccctcacagaggtgttacgatgactcagttctaagatgaatataaaagccctcatgatggtgtcctttaagccacaggctggtttccagaagttgctattcttgcccatgcagatagacrgtctctctttccttagtctgcaaataccacctcttctttcgccaaaataccacctcttctttcgccaatttctttgcccgcagaaactccccaagtctcactctctaggtacccaactcatcacttcctggtgtgatgacacacttggaatcccagaaatttgtggctggagaggaccttccaagtaaactgcccaatccctcattcaggggaagagagagcttagtcccagatggttgtgacttgctcaagtcctctcagtgaccatgaggagcttgcagcccaggcgttcaactcctaatccagggctcgacctatgctacctccactctctcctctcaggttgctcctccaaatgggactgaattcatcctctgtacacgctcaacttttgaacctcctcttctccagatgtgtctaaccatcccttggcttcaataactgtcccaaactttgtcctgaagtttgggggttctaattttaggtgggaaagatccatggctttaaatcagtcacatagtaagaagcttattttttttctctgaattcctcaaacagaaaatcttgagtcagtgctgatgtgtgtctcatgctggccaagctcccttttcagcaagaagtgaggagggctggggctcctggcctgcagcagacacagtgtccagtatgagtgaaatgacatctgattattgtattatttgcatttctcttatttcatgagtaccttctaatattgacagttggtctggttttccaagtaagccagagataaatggtttccactttaaatagtgtcaaaaatagaaggaggagtcaacctaaattgaaatattagctaagtaaactttaggtgtatgaggataactgcccccaccccctacccgccacacactctgggtcctcaaagcagtggtctacaagggagtgaggtttgtataaactcataatatcaatgaaggaggaggagaatttttatgatgcaaacctctattcggcttggagggcacgtctgtttactcaacccacgtataaaaatacctcatagcatatattttagccagcaagtattctagcatggtggaaatgatttactgaaacttagaccttctcctgaaatccagccaaaaatctgatttggaaaaccaagaagtcctatttagtttctgccatcattgttactgaatcacactgactgggcaattagtgacataaagttctttaattctctggtcttctttcatttgagcatcgtgagattgttcttctctcctttctggtcactgactaagtgtttgctgaactaaaaatttggtttttaataaaataaatggagggggtcacctttgtccatacctcattttcttcccacgtatataaaagaccatgttttccattgtgttaatgtttctcggcagaagagcgatggaggtttctgtaaactgagtttctacatctggcagcagaaagtggcccacagttatattttttgtagggaaagatatgttttyagatgaccactctgcacagattctgggaggatttcacagtatttgtaacctgtkattttagattctaagcacatttgtagttccagtggcacaaaaataaactgtgttttcttggaaaatgtgtgtgtctgggatatgtgacaggacttgcaaccttaaacaagatttccaggcacttatagttgaaccatgccagtaaaaatatgcttatttagacattaaaatcctagggtgcccacgtaagtatcctaagcaatgtgtgttacatgagcattctttgctaatgtgctttwkctttgaacgttcttagctctggctcctgcagtgttaatgtactgcagggaaagttgaactcagatggtggggcttagtttctgttcaacacatttgatgatgtgtttcttacattcaagagagtagtttctcgtgtaggtataagtcacatcacaactggtaaagtagacttcctcactcttaatactcatagcaatgtggaagtttttcttgggcattcagaagagagaaaaggcagcaggtatacccttcatctgtgtattcggcaagcatcacttgatcatccattgtctgcaaagctgtatgtagaaacggggaagacaaagaggaagttggggaccctttcttctggagcctgaagtctgctttatttcatcggtgtttcccagaaaatcaggataaattgcttcttttgtcaaaatgtgattttcaaaaagttaaaaagcaaaaaactctttcaagkgtttagtaaacacatgccaaaaatttatttaactcattgatgaagggaatagtaggatgacaaagctggtttaaaggaggatatgagaaagatattcaggtagatagaaaacgagagagaaaggagggaaggaaaagagaataccggaataagattgcaaagctagatacaaaatggttcatttcctacagggcaataaaacaataatatttggggttrttgttcatctggtcagaaatgttttgcacctacactagacaaaaattatgtgtaatttaccaattttctacagtctgtatagaatctgggtccaatcaatagtaaawagtaagtcaaacaaagttatatttcctgtgagtgttagatgacacttcgatgggcttgtcagtcagtgctgtagtacattactacccggtarcgctttctgcaatgatgaaaatattttgtatatgtggtgtttaatatggtagctatgggccagatgtggctcttcagcatttgaaatgtagctaatgtaactaaagaactgaattcttaattttatttacttttcattaattttgatttaagtagcctcatgtgactaatagctaccatgttggacgacatagctctaacatgccattaaatgggcagacactcatttttatttcttgtttccaattttggataatttttttaaattgtattttaaatgttgtgagaggagctatgtaaaagaactcagagaagactcctttgaaaaaactaactcttgcattaggcaaataatttctttttctttcttttcttggttttttttttttttttttttttttttggagaagaatgttgttgagacagagtctcactctgtcacccagactggagtgcggtggcacaatctcagctcactgcaacctctgcctcccaggttcacgcaattctcctgcctcagcctcccaagggctgggattacaggcacgcacaactgtgcctgctaatttttgtattttttagtagagacagggtttcaccatgttagccaggctggtctcaaactccttacctcaaatgatcctcctgcctcagcctcccaaagtgctgggattacaggagtgagccactgcacccagccagtaatttcttttattgggtaaaaatcctcatatattggttttcttggtagtgcgctcatctgaaattgttctcgtcagcaagggagccagttatgaagctaagcctgtttggagggaacccaactctggtgttttccaagtaaatcagcttggaattaactttcctttagcaagataataatggtcatgtctagttttgattaaaaggggcttttgggtttgcaacaaaggaagaaactattgatatctcacgaggattttaaggtttatgtaagttaacttttctgctgccatcacttcrttactcaaaaagagcrrttaatgcattgataaggttggctttgatttctgatgaagctcatttgctttactgagttttttcatcttcttgcttgcttgcagggctttttccgcagaagtattcagaagaatatgatttacacttgtcaccgagataagaactgtgttattaataaagtcaccaggaatcgatgccaatactgtcgactccagaagtgctttgaagtgggaatgtccaaagaatgtaagtggagtctcaaaaaactttttccctgttttccttatctctgtgatttgctcaccttccacagtcatgtggaattcacacacgacactaacgaaatcttgccaagggtaggtgtgaatagagatgacatgaaaatggggattgatatggagattttgagatgaaacttgagtgacagttggtggaaaggcaggagttaggcgtcgtggatgtcagatttgtattccaaagcagtggctaactcactgtggatcccagagccattagcagtaactcaagcatattacacagtcacacggtgactccatttcccctatcttgacaatgggtataaggatcttcgcctgtatyggtgaggataagataaaatgataggcatgaatgttaacagtagtcataatttgcccttttttaggagggaaggattgtataacttgtggaagaaacatttcaaaatytgggacactggcatttttccaaacttgatttcgtttttcttctccaagccatcttttccaaacaataatgcactttattartgcaaaagatattttaaaaatacattaaaaattggctactggtccataaatatctgatgatggggatttgaaatataccggctttagtataaaaagagtatgtgtacactgcaacaaatttcgctctttctctatttgatgtgtacaaatgtagggaataagaaagtattaggtggatggcttggctcaagcaggcatagggaggtcatggggctatgtgcccagtgatgctcttgtggggctgctgctctttctgtcactccatcatggggggattttggtgatggcgtgctgtgcacatgtgagcagtgggctgggtgctgcgtggggaccctagagatacctgagacatggctgctgccctccaggagcataggataaagagccaggcaccccaatcatgatcctctaatggagttggaggaattacattatgaatcaagggctcttagatgttggaactgggaaacgtgacccttgggtgaaaactgattgaagaggtaaagcccctgtwgccaaccagaggcattactctgagggtgctcagctgggaatcttgccctctgctgggagctattgctcagggattgtagcagatgtttgttggtagcccacccagatatctttcctaactgtactcctgccccttcacctttcctaactgtactcagattttagttttcttttataccccttaggtttcaatgtttcagagaaagcttcacagctgggatccactcagtcaattaaagccaatcagtrtattttatgttccagccgcatgcgtgaacatgtaacctaggctggttcaatgagagggaattcaagactcgtgcgtagaatatcaggacaggagtacccttccctccatccatgtgaacaaggaaacaggtagccacaagtacccctggtggccatcctccaatccccagggaagtcagctgtaggacaaagcatgcactgtagatggaaaagtggaaagacagaaatcaagcccttaatagcaccattgaattactgaaccagccaaccctatgaaaccactgcctccaggtcgttttgttatatctgccaagaagaacccattacagcttttggaatgagtgtcttgttaatatttagagtcctcatgaatgagaatggactgggtcatcagacaggaaagcatcctgcatgtgccattccttctgggaagctctttttcctctggacaattccatctgcagatcatgggtcacwtttcatccagttcctttccctctctccaaattttagagccattgagttactcaaaatccatacatttgaagataggaagctaacattcaattggctcaggctctaaatccttccactgaagagaaaagcaggataacctgaaatagccagattattcctatgtgtgagattcacgggatgatcaccttctgctctagttttggtctgatgttctgtagacatggatggcacacagcatttctgtgggagaatttcagttcaggctgaaattataaatgagtaagccagatgtggactcagggaaaatcagtacttttgcattattttgtgtgggctggagacccatttcctgcttacattacttaaaacccatatcctgctgctctgtaaaaactggcagcttggttggcaattaaaaaaaataatgtttacacccacaggaaaactccagcatcagccctcaaggagcttatcaccttaattagatttaaaaatatagaaatgggaagaaaatgggatcattatgtccaagtacacaaaaataaatgtatttttgttagaaggaaattgaagggaaagaaataaacacttggaatgtagagattgagagtctaattggatatttttaaagttgaaacagaaggaagcaggcaaatatgagaatcagtaaccaattataccacagtatacgcaactgaaatgaaaccaagaataatagatactcatagaatgttagaagtgaaaagggatcttagagattgattttcactcacctctctcatttgacgtacaagtacwctaggactcagaaagatgacacggttctcccagcagtcccaactggctgaagacataaccaagactacagtgaartcggccacctctcctccccatgccttctctgmagtagcragatkagcaagattcacattccattctagycataggacatgtcagttcatctgtatgtgtcagaatcctttagatgagagtgacagaaaacccagctcaaactggcttaagctacacaactctacgcatgtcactgaacagtccagagtaatatgctggatccaaaggcacatgtttgtttttggggcattgtttctctttgtctctcacagctgatttttgctgtgctggcttcattcccaggaagattttccccatgtctaacaaagaagggcaccaacagctccagactgttaatctattgacccagcaaaaagagagactattagatcccgattgttccatcaaagcctagggacagattctcattggcctaacttgggtcatgtgcccttctgtgaacgcattgctttgagcagggcattgctttgggcaggggatagaatattgtgattagccaggtctggatcatgtgtcaatatctacagcccaggattgaggttgacttcacccaaaccatgtgggtggggagtgtggaagaaaatgttcctcagaggggaatcagaaagacaggaggcaaaaatgacctcatgtccaccatgatttgtcaggtcccacagtgctgttcccaaggcactcttctttatgctgtgggagaaaaaaagaaggataaaactgagaaaatttaagaatcattatagtaatagctaactggacagggtattttctatgtgccaagtattacattaaccactttttttttttttttttttgtgtcacccaggctggagtgcagtggcgtgatctcagctccctgcaacctccacctcctgggttcaagcgatactcctgcctaagcctcccaartagctggcattataggcgcctgccaccacgcccggctaatttttgtatctttagtagagatggcgtttcatcaagttggccaggctattcatcatgttggccaggctggtcttgaactcctgacctcaggtgacccacccacttcagcctcccagagtgytgggattacaggcgtgagccaccgcgcctggcctgcattaaccacttttaatgctttatcccattgatcttcataacaaccctatgagatagattagttacaattcctccttcccaggtcccaccatttttttggcagatgtggaagctgagacacagagacattaatttactcaaggtaacacagttagtaaggggcagtgctgagatttggaaccaggcagtttgatgagaaagtctatattcaaactgaaatatatactgcgtgccataggaagcagcgtttaaaactccgagttcctttttccactctattttattgccagtggttaataaaacaataaccatgctccttgctctatattagagatgtatcccctagaaaatcatgtgcaaatttaatttttatagatcaaatttgattttacatgtgtaaggggatttacaagtaaaagaaatcctttaacgtggcctatcagaacagtatgcttatttcttcattttttttttttttctgttttgtaaatgctgctgggtataccttgtattttccaagggcttataggactagggaagcctttttgcagagaaacagctgtctgtcaaagcatagaataatggcaagtgaaaaaaaaactcgatttttagcagcattctaaagaggtggtacaatagtttatgaagaattggagaaggaggcaaaggaagcaaactgactcgaatgatgaacttctgctggtggcgtgggaggtttgtaatgatgtcagaagaggaaagcatgtggcaaagccctgaaataaaaacaattaatgaaaaagagaaacaataaatgaaggcataacatttggattatgaaagaaatgtccagacaagcttacggtatagataatagctaatggtccatgatgggaaagaagatttaagatgatactgtttagaaaccatgggagtaaagccctagaaagcctgatcatatgcatttaagtcagttacagaaattcaaatgaatagttcagatctttaagccaaaggtcagcaaaccattttttaaaagaaccagctcttcaggcatggtagcgcgctcctataatcccagctactcaggaggccaaggcaggagaatcgcttgaacttgggaggcggaggttgcaatragccgagatcgcaccattgcactccagcctgggcgacagggtgagactccatctcaaaaaaaaaaaaaaaaaaaaaamccagctcttttttaaaagatgttagaaattttagaaaatatttttgaggccctgtgcagtagctcacacttgcaatcccagcaatttgtgagaaggagatgggaggatctcttgagcccagtagtttgagaccagcctgggcaacgtggcaagaccccaactctacaaaatttttttaaaaattagctgagagtgatggtgtggacctgtggtcccagctactcagctaatcgggaggctgaggaaggaggatcacttgagcctgggaggttgaggctgcaatgagccattttcatgccacttcactccagcctgggcaacagagcaagaccctgtctcacaaaaaaagaaaatatttgtccctgtcttcattacttaactctgccattatagcgcaaaagtagccatggaaaatataaacaaacaagtgtggttatrttccagtaaatctttatttacaaaagcagatgaagggctaggtttggcccacaggccatggtttgccaatgtctgctttaagtggctcatccggtggccaaggatgccacttagggctgctctgtgatcccatcccatgcttctcccctaccagtagacacacccagcttccagccacactacaccatgctgacttatgagccgtatgtctccatttttctgaggatttacctccttctccakcagttgaaccccaggagcctgatgaaatgtcatttcctctttgaagcctcccctaagcctcattccacactctaggcagaattattcattcttccctccccaacccygttttctcacagtgcttcrcacaaagctccatgaaccgcaaacttattatattatacagatagtatgattcttcacacaccagtgagtctccctggctggattataaactcttaaaaggcatgcatcatgtctttctcaccttgtagcccctgaatatagcatgaagctttgctcrgtgaagttagattgatcaaggggttaaatgtgaccagttttaaaggcaaacccatcttctccctggctttactttctgaaaagttgtcagaggcaaaacaattctaggtgtgtattcaaatcgcagtcattcgtttatctgctaggggcccagaacaagttactcaacttcttggaggctgtgttttctacctggatgagagaaacattggtattgactaacagcccaggygtgacatgagaattgatgcttttaatcctgtttagacagcagtgtttccrtaagctgcttcctcttcccagttccctcccccagaagacattagatcttctagggcttttgccagtgaaaaaggctgagctgagcaggtgtcttgggkagttgtgcatgacagaagcccagttaagagggagaagcaaagatggacatgtattggggtttggaccttacttttgccaaaccttagctatcaaagaagggggtccagggataggggagacactggggtcaggaggtcagaaggaaaatggaagacaagaagtaggccagaattatgactcgggtgctgtgaggaagggagagtagtataccctggatgcccctgaggttaggctaggttcccatgggtcattggcctcctccaagactgggtgccccyaccctgtgtctgtaacagaaacaccatggaaggtactgttgctgccaccccctcattccagctcctttctttctgaaaaccactggccgtgaattcacacagggagcctctttgtattgctctttgaggttatgtttatgtgcccatgcccttgagtgatgggcaaaacatgtctttgattttgtttgagaatgctttttaatgtttatttcacagcatttttttcctatgacagtttcataagtgtatttgtagaatagagcaattgaataatctctgaatttaaaagtccctaagcactcattgacaccttctcatttggggcatattgagcttaaaaacagcttttcataaagtctctaaattccaatttatactttagacatgaacgtccccatgggtcgattggatggaatgaatgtgctttgtatggacacttagatacttctgtgggaggattttgttgctctgtgtttctctcatttcccctttactgttaaacttagattaaaacaaaccttttggactaaaggcacttaacctcagttagaatcacctttgcttgtgcacaaattatattgatgtgctcattggttctactgctggattttactggcttaataacagggaaattcatattgtaggttgcactgtgtagttgggaaattacataaaaatcatcatcagggcacttaatgtctttctaattttagtttatttcttcatttgttcccgtgttagatcccagcctgttactttgcttccagggttcactgtgatcattttgttctgttcaccagaaactaccattaacccccaccttctcttcttgctctgtggcacacaaatccctgaagagccccccaaaagtaagtgaaaggctggaaacttcctacttttatacctaaaaatgtcctagaagctggaaaataaaaatctgctgcccctttctacttgccaaatatgaatrtttgcctgcatctgtttaggagatttaaaaaaaaaaaaaattatgtttgggtaccagcagcccggtgatgtcagtgccactgtgggactcaargcccattaacactcagactgaaaaggaagtattaaaattccttcagctttactaatatatttctccccactgcctgtctcctggagaggggacactcagtacattctcaccttagaaaaatgagaaatttccattacacaatagaacagcacagggsaaagaacaaagggctttgaagttagcctgagctgaggtcaaatgcagccctcgcctctagctatctcaacttgggcacatggcaaaattttgcttcacgtgaaatgaactaacccattgcgtggagattatcayagaaatgttgcaggattgttttgtggattggactcatggggtaatgcatttagcaccgtgcttggcacatagtaagtgccgaatgagagtggttgtctgctactgcttcttttggtgacacagtttggttgccgctgttgctgctgccacagctgtgttttattatagctacagccttgattatacttcaggagaaaagttaaaagtagagactctattcattttgaattgtttagaacaccacagcttagaagtgcagctccaaatattatgtcacagccttaaaaataaagtttgcaagcatggtttctaaaataaatatccacctttcttggctacttaaaccgggagccaggtggctcatttgcccagagatgccgagacatgtgtaatcagagaatgggagagtatcctggtatcctggaacccaactccatggagaaaactgaactggggtgttagaaaggacgcctggcccccttccttcctcagtcagctcaaggtgaggccatcagggtcttccagcagtgctgagcccaagctaaatcgccacagagacaaagttgcccttccccttccccgtcctcccagcagctgcctttctttgctcatctggcaccttccatctctcctctgccttatttgggactctgtggcctgccttcctccagatccgtcatgtcccttctcccaaccaactcctgtccaccctgtggcctcctcagcaagactgcttttgctgttagccacctgagaggaaagctggggaggatatcagtggtgctgtggtagttcatggtcatgaggggctttactaatggcaacagccccaagacttcaggttatcccatgcagcagataggacaggaatcatattctgattcagtttcctgagattgagagagggtaagagacctgcctgaggtcacacagctggtatacacccatgggtcttaattctaattcccagcatcctttcaactaccctttgcttctctaaacaatgaagttcttgcacatatttaaagctacacggttttcagtatcttcacctgtattcgctcccacatcaaatattctataattacaggccgggcacagtggcccacacctgtaatcccagcactttgggaggctgaggtgggtagatcacttgaggtcaggagtttgagaccagcctgggcaacacagtgaaaccctgtctctactaaaaatacaaaaaaattagccgggcatggtggtgagcctctgtaatcccagctactctggaggctgaggcacaagaattacatgaacccaggaggcagaggctgcattgggccaagatcgagccactgcactccagcctgggcaacacagcaagaccctgtctcaaaaaaaaaatctataattatgtggtttgatttaacgtgtatactagtttaatgcagtatttccctaagtgtaaactgcacactgtgatatgaaatataattttagggaatattgaacttggcataagacagtatgaactcatttaatgataaagattttcctttccaatatttattgtctttttattaccaatgagaaaaatctcagtttgatgccaatacagccttaattaatatttcttgaatctctgctaatctgtctttttaacagatggcaacaatccctaggtaggactgaaatgtatttatttcagatgtctgcaaattttcttaaaaggccaggcagtaaatattttagcatctgcagtccatttggtgtttttttgcaactactcaactctactattgcagcttcagagcttcacaattgagcatggctttgttccaataaaactttacaaacacagtcacttgacctgaaaaccctgtttattttttgttttttgttttggtttgtttttttttgagatggcgtcttgctctgttgcccaggctggagtgcagtggcacgatctcggctcactgcaagctccgcctcctgggttcacgccattctcctgcctcagcctcccaagtagctgggactacaggcgcccgccaccacgctcggctaattttttgtatttttagtagggacaggtttcaccgtgttagccaggrtggtctcaatctcctgacctcgtgatctgcccacctcagcctcccaaagtgctgggattacaagtgtgagccacagtgcccagccaaccctgtttattttttaccctacctttctatttatggcaaatgacacccctttcccctttatagtagtaatacaaacatttcctctaaattttatttaagaaaaaaaatcaattgagacagaaatcgttaagtgtgtagcagcctgtgaatatgtgcaaaattgtgaaggcagtacttcaaaggactgaagtttgagaaacactggttttatatgttcttgtatcttaggaatagaagcagagtctgcagctgtggcctgagccctctcagagtctctgtagtgcctcagttgctggtcagatcccactgacatgcccctgccttactgcctgccgctaacccttcctcacatgctgaactctgtgcacmacttgaggatgggaaggrgggtcttgcttttttgcatcctcaaggtttagacctttcctgataaaacaaggggtcaatgaatgggtggatctgtcacagtggattttaagcatccgggggaactgatggagggatgcagtatgctgcttaaagcctggacttaagggggagtcagattcataccccagcccaccacttacttagctctgtgtgatcttgggcaggtcacttaacatctgtgtacaccaagttgcttgtctgtaacatgaagagagtaatagtacctacttcatgtggctattgtgagaaggaaatgaattaawayatggcaggggctaaaaacagtacttagctaagcgttarctcctgttactgttccggtatctgttatgatactgagccatcctggtctctaaagattggtgtattcattcatcagcggtccttagtgattgtacaggacagctaatgctccttccgacccagtggtccctttactcaaaacaagaagtacatgtccttgggactcaaatctacccccacaaagcaaggtgatgggtagatggggccagaagcagtttcagctctgagccaggtgatctgatgttggaattcatggcacttcatcgcttacacaatcaactccaaatgtccaaatgtgttagcatgggcagagagccctgcacagctgccccagcctgtccaacactgatctcttgtcatgtgcccccaaatgtgccacacactagccatcactgaccactcggtgtcctctcatgtgacacagcatccttaggcggtgcctgctgttctctctgcctgcaatgcctttccctccctactcctccttgaagccaccttcttcctaaatgagcaggcatgcgcacatacacgcgacacacttttctaacagcaaggagtgtgtgtgggtcactcttgcctctccatgctatgaagtgttagtggcacctctattgagatgactttcagagtcaaactgttttttgggtggtccaggagcttttggtgtctgtgtgtgtgtataggtgttgagagagggaaaactcatcrcacagaaggtccctcactggctgggggtgcttcaagaacaagtatggagtttggtttttatttatatctttaattgtgagcctagtgccttgtacttaatagatatttctggaatgaattgaaagcaaagggtacggctgggtgcgatggctcatgcctgtaatcccagcactttgggaggtggatcacgaggtcaggagattgagaccatcccagctaacacggtaaaaccctgtctttactaaaaaaaaaaaaaaaaaaaaaagtagccagatgtggtggcatgcacctgtaatcccagctactcaggaggctaaggcaggagaatcgcttggacctgggaggcggaggttgcagtgagctgagatcgcgccaccgcactccagcctggacaacagacggagactccatctcaaagaagaaagaaagagacagagagggagagagaaagaaggaaagaaaggaaagaaatgaagaaaagaaagaaaagggtacctaaggactggggattctgaatcaggaacttctgtctgatcttccaagagttaagagatttgaacacgtgaacttaaagtgaaatacaagcccaagaaaacattaggtcttattgatatcatgagcccatttttacctttcccattctgcctcctctcccactttgcaccatatgagtgatagcatgttacccctttcatgacatgacatcccaatgctgttttttccatggtggatgtaaacagatkaagcttgtaaataggtcctaacagagatttactttctctcaaaactcacaccacacacacacacacacacacacacatttcatcaaatcgatcatttcttaaggtgcactattattttgtataccactaaaagggaaaacggtgcctattaaaccaagacacactcagattgtaagacaggtggcaatttcagaaagggggagaggaagggagagagggagaaaccagatatctggtttcaaccctgtaagaaaaaaggaagtgccttacattctaaactggaaatattgtatgttttcatcttgagctattttttattctgctttaaatagacattgataaaaccttagtgcccaaagacaatccccagcaaagagagttggctgaataaatatgcaagtgcttctaaaatagctggcagagagccctttgtttggaaacaaatgtctccctaaaaatagcaacctgaaattctcctgcagtccctgtgttctggagcaatgaacatggccctttaagtaccttctcccagtgacagcaattctcaggagagtggctacctaaatcgctcagtaaatccttgcatagagtacagtctggaatttgctcctcctggagtggtatcaaggacttaaactctatctcttctccctctgctatcacaaaatattaactgtcatggttaggttatttctttcatccttctccctttacagctggaaaacaaagagttgagcaattatctgatgaattagattaatgaagacaggcatcttttagtactgggaccaagcaaagcaaacaccctgttttctcaggagaaggaaagtttttgtccaaaatacacacttgattgttccgacacttcattttaccaagcgtaaaatacctccatgattaaaaaaaaaaaatctgctcctttcattttcaaaatgattttaggacacaaatattttattgatattggaaaatgcaactcctccatttttctttgcttgtttttttgggggaaggggattataacgtcagttggtctgacttctaaacaatattttggtttagcaacattgtttaaatcttaaaataaaactgaggaacttmactagtgtttgaaaatggacccatttaggagccagtcatgatatggcccttccaaagggaaagataaaagttgcttctagtaaactctgtggactcaagagatttaaggaggacaggaagagaatcaagtgaaaggtaataagtgaaggagtcccactttatgtcctgaaagtgtccagacacaatgtttgagtagttttaaactgaatggaaacttggatattgtgtccttggactttcagctctcagaaatctgcaaatatgcagtctcagaatgtactcccaccctactctaatggatgcagtgagtgagttatttcaggaagaaaggcatcagggcttcctcctgtctcttggggctgaggaaactcttggagatggccttccccacattcttaaggataataacggtgtccaggtctatggagtgcaaagccccattttgtttttacaaatagtgccttctgtgtggcattgtattccttaaaaatagaattgcatccatcagattgaagtgtggtgctttactccaccagaatggctgacactaaaaggactgacaatagcaaatgtttgtgaaatgtgaagcaactggaactctcatgtgtggcttgtggaagtataaatcaagccaaagtttggaaaactctttggcagtatctcctaaagctaaacataccaatatgactgagtggttatattcctgggaacatactcaatagaaatgagaatatggacccacccaaagacacatacaagaatgttcacagcagatttattgataatagtccaatcctgggggggagggggaacaaacccatatgtctgtcaacagtagaatgtgtaaataaattgtgacatattcaaatcatggaatatgcttagtaataaagaactaacagcatggatgaactcaaatgacattgagtgaaagaacttagaacaagagacaagaaacagtctatattattccatttgtttaaagatttaaaatgagcaaaacttgtctatatgataatgagaagaatggtggttaccctcagaaaggaggtattgactcaaaagagccacatggaatccctgtggggtgctggacattctaaactttaatctgatatgtacatgcaaaactatgtgtgtattttatacctcggtgaaaaggaaaaagattaaaatatggagtagtggaacggccatttcttcctgtgcatagagaaattgtgttatcatcaagaagagtaatacctctcattagaagaatcttccttcctgttaataccttaacatttcttcaggcagtgttttaacatcttgrcattttgccttttcctctggtttgagacccttttcacttcagctttgaatgtgtaaggagcaccagaaatgcactatgggccatgatctactcctagttccctgactatggttatctaataccccaaattgcatcaacccacctaactagctttttcttttagggctatgcactccaaattaacaggccagggatttctttacaacttgttatatttgaaaaattattttacccatcagataataaacagctaaaaaaagataatgtaagaattgttattgctaagtgttaaattatcagtagtggcagtatgttccttttagaaatatagtgttcaagatgtgatttatgaacttatgtggattccagtttaataattagctaattattcttttttccataattaaaaaaagcaaggtgctttatattttgattcattcattaaagggaactgggacttcaaatgaataatcaaattgagactggcttagggaagttaacaaaaagttttggctggtacaataggcaacctagttaaaaaaagccatcagagtaatttatttgtgagttctagatttatcaaaggttcatctttatttccttgtctttttttttttttgagacagggtcacactctgtcgtccaggctggagtgcagtgatgcaatcttggctcactgcaatctctgcctcctgggttcaagtgattctcgtgcctcacccacccaagtagctgggattataagcatacacctccacacccaactaatttttgtatttttagcagaaatagggttttgccatgttggccaggctgatctcaaacacctggcctcaagtgatccacacacctcgccctcccaaagtgttgagattacaggtgtgagccactgtgtccagcttccttgtcccttttatttttattttttaaaagtgtttaatatatactgacggcagaaaagaaagcagtaaaaatgacaaattcttccctaatgccagtttgcagagtacgagcaattaatccagcattcgaaatttagacataaagacatacaacttgtggtttcatgagatggtattttaacaagttgattgaaaatatgtaatgtcacttctaaaatatcaaaactaatggggttggttatctctgcaagagcaaatattaggaaaccctcaccctctttatagaaatatatttatctcttgttgctgtcttcaatgaatacaatgaggcttacaaaagtaatgtgaaaaaaatgacaactcaacagtaaaaagataaatasctcaattttaaaatgggcaatggatttgagtagacattccaccaaagaaaatatacaaataactaataaatacatgaaaagatgttcaacatctttagtcatcatggaaatgcaggtcaaaaccatgatgagatgctgcttcacacccattaagagggctgtaataagaaagacgagcaataacaaatgttaggaagatgtacagaaatttggacactcgcacactgctagtgggatcataaatggwacattgccactatgggaaacagtttggcagttcctcaagaacttaaacagagagttattatgggacccattcattttactcctaagtatatactcaagagaaataaaaacatgtatctacacagaaagttgacagaaatgctcatagaagcattattcataatagcaaaaagctgaaacacccaaatatgcattaattgatgaatagacaagtaaaatatgatatatccttacaacagaatatttttcatccataaaaaggaatgaaatattgatatatggtacgacatggatgacctttgaaaataytacgctaagtgaaagaagccagacacaaaaggccccatattctatgagatcatccatacaaaatgtccagaaagggcaaatccatagaaacacaaagtaacttcagagttgctagaagttgtcaagcagtggtgaatggggagggctgctaatggaaatattctggacttagatggtggtgactgtttcacaatttgtgaaatttgtgaatatattaaaaaccactgaataacacattttaaaagggcaaatttatagcatttgaattgtatctyaattttaaaaaaccgatgattttaaaatgttaggttaattgatgtaagggaaaatataaaagtaaaccttggagtcagattcgtatactaagttgtgtatgtgctagatgagggctcttatttggtaaaaattgtttctggtagtcagagctaaaaggggacaagttcagtgacaagactctcggtgtccacaagaggaaaatagccttgttgttcagaagaatcacagattttctagatactgatgtttgagatgaatgtttcccacaggtctttataaagtgagtactgggagaygtcatttaggatgtcmttgacatttttcgttgctcttcctcaggacatccctccaggtagttagttattcaatctcatctgttttccaaattgaaataaaaaggcatgsaaaagcaaggcaatccttatgaccttagacccaaaagaaataacgatgggcatgaaattgagagagtacaataaagatggcttcctcaaaacaagagttgactctcctcttcattccatttcaaattctrtactttaaaatagttctccttcaaataatgcatttatgggtattgtctatttctgtttgatttkcccttttaaagtagaaatcaactttttattttagaacatttttctctttattaaggtataacttacatatcttaatggcacagacttttaagtgtactgtttagtaagttttgataaatatatgcatccttcaaactacctcctaagatcttagaaggaagcatgggggagctttctggggttggaacattttgtatcttgatttgggtggtggttataattaaggtaaactcttccaatatctgtcaccataggttagctttgcttgttgaacttcacctacacagagtcacagtgtatgctcttttgtgtctagcttctttcattcatcattacctctgtaggattttcccatgttgctgcatatattggttgtttgctccttctgttactgagtagcattctattttatagataggcttttctcatgttgatggacatttgggttgtttctggttagaagctattatgaataacattgccttgaatatcctgtacatgctttgtgggaggcatggccacttatttctcccgggtatagacctaagagtgaaattactcagtcacagggacacgtgtttaattttattaaaagcagttcgttttccaagtggttattctacctgccattttaccctccatcagcagtgtatgggaattccacttgttccacatccttgccataccttgatatttcagtcttttaatttcagagatcctcctgggtctgaagtggtagctcattgtggttttaatgtgcattttcctgatgactaatgatgttccatttctttttaatttaataaaaaatttattargttagaaagtataaaacaaaattatgcacagtttgatctcatatttgtaacaacacataagatttgaaagataaaacccaaaatgtcaaaagttattgccacgtttkttaagcttacctgtatttttatcacttatcattttagtgcacatttgtttgtgtgattaaaaaaaagaaaagctacttttaaaaagcgaattaactcagattattctgagataaaacttcagttttcctgattttctaacactaagtaatgttgggcattgacaatgctttagatagaaatggttgagaaaaattgaggccaatactgtttttgcatttacttctttgtttcccccaagaggatcaaatccattcctaaacatttagaaatcttgatatctgaagataacatccatattcacctcagtgtaaaagaccataatcaggggtcrgcctatgagccaaatctggcctgctgcctgtttttatcaataaaattttactggaacagccacatgcattcacttatgtattgtctgctgctgcctccttgctaaacaacagagttgagtagttgtcacagaggccatactgcccacaaaacctaaaatatctactatctggccctttaaggaaaaagttttgccaacccttgccatattcactcttaaaattttctattctaattcaaacactggttataagagtttagttccacgccaaatatatgtgcaatttgtaactgcagccttcatttctatccagttcatagaagctactcagtagttacatgccttaccatcctatctcaacagttcagtagggaccttctgatttcagctctggactgaaaattcttaaactattcctctcccagtctccaaaatctggtcattttaggtacagggaacataaaaagagttggttcctaatacaaatgcaactaactatgaagttatatccttttaaaagcacatatagatgagaatttaaacatccaactgataactctttttttagataaaataagtagcgactgtgaataaatgagcttgcttttcttatctagaaattgcctcagaaggcagttccagaagaggagagagaaaaatgtaagtggtgacactagcgttggaacaggtaaactcaggatgacttttctttgaacagtcatgtatcatataaaacctcactcatttatagccacacatgatatatagtgaaatgctctaacacttaagtccagctcatgacaaacttattacccttcactgaagcctttaataaactaccaaaaaggtatgtaaagcaaattcccttaagccagcatgatgcactggcccattttaaagatggacttcaagcaagaacagtaactgcctctgttttgtcagctgtagcacaaaagtcctcattcctaccctttatacacctaagggagtttgtgacaataaaatatcaagagtatcaaaaagctgtsaaagtgctttgagaaatcaaaatgctttagaaacagaggatataaatgtggttaattttattaactcagagccttcagagcaacctatgtctgggtctcccccatcaggcaaggaaagggcgttacctttctcctgaagtccacatcacccaagacttcctatctacagagcgtgtctccagtgaagagatctttgctatacatgctcttgtcacggtagaacttccccggcctacttagctttcaaactttgcgcatctaaaagatacaaccatctttcttagagttccttcctagatctaattatacaaaaccgggggtgccgcaagcatcacctcccatccaaactcatcacacacgttcctgtttcaagggtgaatcaacatgtgaactttgctgctgcagagagctgacagctgcttctgagttattcctggtgcctctgacagcttctaggatattctgggggaaaaaataagatatgagaatccactggagctttggttctgctggcctgtaattcattaataaatgtggaagagagctgtgcagtaggaaggaatgaatatacagtatccaccttagtctaatgtagaagctgtctattaaaaagcactaggctgagaacccagaatgtgacacctaggggccagccatgcccaactagctgggtggccatgggcaagtcacttaacctctctgggtagtgcacgtctataaaacaagggcattgaggcaataattggtaagatcccttccagacatcacacaatctgagacaatagattgtaacatccctttaattagagtcagtaaaacctcttcattgaaaatcatatttgcttccaggacataattacagtgaaacctaattcgtactgtgctctgctccaaatacagtagagagagagctgttaagtggtttttgaacataatgtgccaagattgacttctcttgctgcttttttctcatatgtcacctttttatatggggatctctgaacatttttgtcatggcgtgctataaaagagtatcatcattttagagatgaaatacctgagacacaaagaggttaattacctcactcaagaaaatatatgaaaacaaaatacttcaagcagaagtggtggagaaaaagaccggtatttgtgatatggaagataattgaagttgtaattatccactttacattttctaagggatctaccatggacatgtagacttaaaaatccatcaaaattgtactttctatgtcccttgccagtaaactgcggttgggaagagagaaactaagagaatggtctaaacaacctttcggtaggcgcagggggcggggcacgttttacgagtaggtggcaatatacacccatcaccctcctctgtataccaaacacagaccgcttgtctctggcttttcaccctcaacattgaagttttctttatttagcagtaaggtttctttattatcccctgaaaatagaagttgcccagggaaaggtggcaggttacatcacttcatggtgcctgagaggaagtaaagtgttgcctgcttgtttgagagcaaatttggaggtgggaggtaaagagaaggaagacatgagggcagtttgcaggaggagcaaagacagagaacactggaaaggcttggcccagactcaattaaggcacagaatttcattctggaagcacagccccgggtaagggggaggtctgcgggtcctcttagagccgtcrggcatctccattcctgtcttgccctcttcaaccacacctgaggtatattttgaaactgtatgttatggccctaggtgcttggcttaaggttctgtccgcagagaaggagacccaggctggttggtctccagtagacactgggtgagggacaaatggacacctgattagaatataatttaaatgttctccagtttgatggtgctgtctagaaagttctgttggtcacaagggctcgtatttgacacaaagaaatgtttgatttggtgacaactatgtgtttattgtaatcccactatgcgttgaaaactggattcggtttttcaacacacagtggaatcacagccaatatgtrcccaaatgtattgagaatatcactggtttccagtaagtttccccaatgttgtcagaagcattatttctttgcatatatggaattgagggatgtcctcccaggggaatggttctctgcccttgtttgtacttgatttctcatctaatgggggtaagaatcacattcttataaatagaaagactttttcaaacacagggtgtgatcattgtctcaaggaastgtgggtaagttttttggcaaagcgaatgatatgaattatcacctccaggtagtttgattttggcagctgtcatacgaggaaaacaagggagatacggaaattcctttttaaagactcacgaattcaagatttatagaagtaaaatgatttggcaacatcaatggctaattaggggttgtgctggaaatagaacctggctgtactgtttctaaggggagtgcccttattaccatagcatgctattctttggagaggggtttttcaccagctgaactgaataaactacaaattaggattgtctgaaagtgagggacaatgtttaccccayatactttatgtggttccctcaaaaaaggcttaacgaatgttttttgaaaatggtaagcaaatagctttcttcttattttcctatttgaataaagaatcagccctcactcacactttcggagctaaagggggaaaaaataaccataaaacttctgcagcaatttttacaaactttttctcttgttcacaggacctattagtaacattgcattatttttttaaatggaccatttttagcgatagtagaagggagaaatctctcattcccattcctatataaagtacaatttaaaaactgcctctttaaaaagttgtagcattacatcctatgggcaatgcctaaggctgaagcacaatgaattttctgtggggtttcactgctgtgacctcgatatactataggttgttcactgcagctaggaaggaatttgtttaaaaagcgcaagaaattcttgaagtatccaagaagcatttgaaatcagaactgctacctttccctccacacaatgtgtggctgataacaaacatgcactttctgaggaatttgagcttaggtagttaaccgacagttctaatggactccagaagacgtacaaccaaataataatgacctacttttgttaccacggcacccagcataaatgatcattttaaactgcttggaaaatcaaactgttcagaaagtacttttacagtcaaggtcaaggtgtaggccagaaaaataagatgtaaaggataatttaatcagaacctttctccaacagacattagggttagatttgcaaagtaccagcagccccactggaaccaccatcttctccatcttggtagaataaagatgaagctcctaagtaattgagtacaaatcttttttatctcataaaagttaaggactgaaaccagactgacaagctccttcaaaagttttccctttacccttctcttcccccctcccttcctccctccctgcctccctccttcctccctccctccttccttccttctttcttcctcttcctatcctcttctttctgtccctttttcytcccatgtttttatttttcttttttatcattattttttttcatgagatacagtctcgctttgtcacccaggctggagtgcagaggcacaatcttggttcactgcaacctctgcctcctgggttcaagtgagtctcctgcctcagcctcctgagtagctgagattacaggtgckcaccatcacacccagctaatttttgtatatttatagagacagggtttcatcatgttggcccgactggtctcaaactccygacctcaggtgatccacccccctcagcctcccaaagtgctgggattataggcttgagccaccacgtccagccctttgtatatttttaaaaggtcttcttttctagctcttggaaataaaatcagaaattatactttatgtggaaaatttcagtgtacctcataacattataaagtgttctgacaaagctcttcaaaagtccatatgttcatggtgttaaatagatgaggggaaaatagaacactcaaagatctagctcagaaagaaaattctcagaatgctaggttatcctgttcattttggaggcaacacaagacaggcagaatgaaagtgtggtgtcattttgaggggagaggcagaggacagaaggggcagagagagccggtgtggaaagagtggagataggatgaaggtaggaggtatttatgtgacaccaaatcacccctgcctcccatactcaaaaacaagctccttgaggtcagaaatttcaccttcattgtcttcatagacccccctcagcaaacatagcttcgggctcatgccttcatgaattgactcattcatttattcacatattttctgagcacttactatgtagactttcaacaaccagtatttattgtgtgctgttttrgatgaaagtcagcatagactaaagggttcctgatgtcctgaagtttatgttcagggttgggagagggtagacacaggcagataataagcaattttacataaatagaaggtggtcatcactgcttagaactgtgctgtataatgtggtagccatgtaaatataaatatgaagctgagcatcatggaggtaaaggggtctattttatgaaaagtggtcacggatggtctgtctggcaaggtaacatttgggcagggacctaaaggaagtgagcaagtgagcaggcagatatcaaaggaaaagtgttccaggcagagaacagcagttgcaaagctctgagctgtaggctagggggtgagtggtaaacaaaacagacacagtcatggttcatcctcttggcgttttcatttatatggaaggtagacattaatctaggcaacaaagaaatgcataattaacaatcaagctgtgatagagaataagtaggggaagggacttaggactggctgatgagggaagcctcatggaggaggtgtgaagcctgagcacaagtatggagagaagagggcattccaggtaggagagcaaaggggagaagtttcctgggctggaataagtcttctgggaacccaaatgaaagaagactgctggggctggaatatagtaagtgaggaaggaagtggtccaatatgtcattgaagaggaagccaaagggtggtgttcttgtagcccacytgaaggagtttgatttttattctcagtgcagtgtagcccattgataagtgataaacattgagtgacatgatcacatttgcagtttgaatatactgattgtgtattctactgtgtggagaatagatygggcaaggggctgggaatggaagtggggtggtyagttaagttgtccaggcaaagcataatgatggcttggactaatggagttaaaagagaaatgaaaaattaagttaaatttaaaaataaagagaagtgaatggattttgataaataaattagagatagaaccaacattaaatagcacataaaaggtacatggagaatgttagatggactggatggacggatggatggctggatggatggatgagtgggtgaatgaatggctggttactagttctctggcttccartgcaattctggcaggccactctcaaactttaaagagaacagggtgatatctaagctggtacttagcggtgttccccttcttcaggtagatctttagtttcccatgattccttactcatgattttaataatggagttctgctggtgaaggtatcatattatttgccaatgaatgttcttgccagaaaaccttactgataattaagcatgcaactggaagcagggtgtgtgtgggaggtggggatgaggggcaggtgtatgtttatgtgtttgtgtgtaattactacttwattcagtgtcagcagtgggaaagattgagttacttagagcagtgcttctcaaatggactatgtacaccagtcatctggggatcttgataaaatgcacattctgaattggcaggtctggaaggggacctgacattctggattccaacagtctcctacatcgtgctgatccttctggtcctcaggtccttctttgagcagcaygggcttagagcagtgatcagcaagtggctagatggcaaatatttgcagctctgcaggcaacagctccagaaatgccctgtgagctgccttctcatgtaaacccagcagtgggcctttgtctgtgactcgatttcctccttagggagacctagctggcraggcctgcaactgagaaacaccaaaaatggtagtgaaagagcattgtatttttcaactaaaccaatttcctttaggatagaggtcaaaaaagctgtgctttgaaattagtcagctgtgggttcaattccatctccaaattgtctgtgaactggagtttccttaagtacaaartggggctgagctgaccttggtagtgtgttatgttcatacatgcttgtacatgaagcatttagtcccaaaccatccaagcacagggtaaatgaaacaaaggacaactagtatacccttatgttttaaggtaaaaagggttttttgaggttttcgagggtagatagatgctcttggcattcctctaacaaacctaaatgtgattatttctcctgagtgactaaaactgtaaaactaactgtgattatctttgcttctatggatttaagagaaaacaaaacaactcactctgtaaacctccaaagaaaagccctycccttcgccccccacagattttcttgctgtttgtttctttacctcagtgtctcctactcaaagcataatgagtgctgtttttgctccagcaacaaggccctgcacaaagccaggcgggaggcctgtggatgaggtgctctgcaagctgagccagaagccttaggaaaatgcttgccaaacactgatgtttgactaattggtaatgtctgyggagttggcaccaggagaaaagaaagtaaagaggctggtggatgttgaggaaggaagacagacagacttgaagccaagcctcgagtgtttggagaaagagcctgcccaccatggagttcaaggaagcttgtcaaactgttttgaaatggtcggttaaacccctgaaggacagtgtgcccagatggccagcatttgmtttagctgttcaggacagcaagagactgagacaggaagatgagcaaagtctcagatgtgccctcctgagtccagacagcttggtgtaaaattgtcctgtgaaaccctgttataacattttagtggcaccaaaaaagggtgctgggacaggggaaattccagcatgggccccatgctgtgtttggaaccagccatcctctgattgttgaactgaggtaactcacccagatgtttccctctttcaggcttagtgtcctctggaggaggagtagaaggaagggaggactcccctcctgccatgtgattcagcactggccagtccagtggataggatccaatcaggtgggatctcaaagcagtctccttccccttacctcctcctgagggatggaagggcccattcctctcaaggggcttccatgttccccatggtagggagggtagagatggctgccttaggagaaaaaagattcttatttctcctctatttgcatctgtccagaggactactccacacagagtagtctgatgtgtccactttcagaagcagcaacttttaaaacgcagccaaacatgaagactcgcctccctaggaacccttctctggatccgttctcatctttgcaagttagcattgattgggcctcacctccttcagccatgctactctcttaggttatctcttggtcagagtggtctttctgaagctaaatcaataaataataatcaatgtgtggctctctcctgctcaaaattgttcaattgttcaattttgagcaggagagagctcaaaygtgacaatgagatgaggagtaattagaatattacagctggttggaggataagtggatacaacagttttgaaaaacaatttagcattagttagtaaagtgaaagaggcatatacctagtgacccagaaaaaaatatagctattgcctaggtatgtgtatgtgtacatgtgatgtgtgtatatatacacatctagtatatacatatacatcctagaaaaatgtgtacaagaatgttcctagcaacactattcaaatcagcaatagaatgcataaattcaaacaatgaaatactatacaacaatgaaattgtatagtagaaaaacatggatgaggcttaggattcatcctaacatagggtcagcaacagaagcatctgtctctgacaactaaaaacacatatgttttatataaatctcaaaacatgcaaaacaaccttttccttaatggatagaaatgtgataaaattcagaaggaaactgaggaaatgatgaaatggacgatggagttacttctgaaggaggaggaaatgggaaaggaaacttcaaaggaaaacatgatatgctttgtcttaaaagtatgtgagggaacttcgggggtgwtggaactattccatatcttgatcatagtggttttcccatgactgtatacatttgttaaaactcatagaactgtatgccaaaaagggtgaattttgtaggaggtaaagtatagctcagttgaaaatacccatgttaaagaaaagtatatggcggacacacagataatatttattatatatttttatataccttatgtataacttatattcttttacagctacgcaaggtactcaaaaaagtgatttttaaaacccctcagtggctcgctattttctcgggttagggtcagattgtttatgtggcctgtgttgcccttcatgtcctggcccctgctcgcctcccctccctgagcaacccacggacccgtggctgcctctccccttcatactatgattactgtctcagcgctgaccttgctggattgcagctgtctgtggacttctctatgtcccactagactgaaggctgcctgagtgttatctaccccttatatcccctgggtctggcacatcataggagttcagaaggacttgtgaagttttgttgagatatgcaggaatcccctttgattcygtagggggaaaaacaatgggaagaaatgggtaagaggtggagagtctacatggtgataattacttcagacttggccagttctacaggccaagggtttgatatcctattactgtggtaacaaattaccgcacatttagcggcttgaactaacacaagtttactatcttgtagttctggaggtctgacgtccacaatgggtctcactgaactaagrtcaagaatttggcagcgctgcattcctttttggaggctctaggggagaaaccactttcttgtcatttccagctcctagaagctgcctgcattctttgacttgtggccacttccatcttcaaagccagccatggccagagtctttctcacattacattgctctgattgtaactcttcaggcttcctcttccactttaaaggagtcttgtaattacagcaggcccacctggattttccaggataatcttattttaggatcagctgattagtaatctcaattccatctgcaacttaaatttccccttgccacataacatattcacagcttctggagattatgatgtggacatctttgagtgggatgggggaggcattactctgcctactgcctacggtgaagaactaaaaaaattatccattgaaatttaagagagtgacagcatgtagcaaatgccacttcctggtttcaggatcatatggacttacgttttaacttttataccctaggagcaaaccctaagacaaggatttgaatgcatatagtttttgtttagtttgtgtgtttgttttacataattgccggaaacacaggtggagaaatagaaagagataaggaagtaaagatagccaatgaagagtgtgttttaagttagttattctgtgtgcaagtagaacttaacctggggaactatgagaagcaatgaaaaatacaagcctcagagttatctcaatcccaataagcaccagttaagggctgagggctgctcttaggagaacttcattccgaagacctgtgaaccacatgggttccagggccaaagaaagcccacaagcaaagagatacaagtgtgggtagttggaagtcagggcaggacactctgagaaagtcaaggccaagggggagatcgatatacagatagataggtagatagatagataggtagatagatagatagrtagatagatagatagatagaagatagatagatacagatagatttatatatgtgtgtttgtgtgtgtgcgtgcgtgtgtatatctcaaattattaaagtcttctggtagtttctytggtgataatgtatttaatctttgtagcactttgcctcccaagagcaatgtatgtttgaaatctgccataaataatgtgaaaatgcttgaccaactgatttggttagcaaacgctctctggctaacatccagaagtgctacagttttctgtattttttattttgataaattttgttgtagaacaagaaaaagatatagacactttaaaaaaaaaaaaaaaaaagcagataccactttcatggcctgcaaattataaaaattttgtgtcagaattcttttctgccaggtaggaatttgagaggggcaaagaagagctcratttaatttccctcagggtctttgctgaagggagaagaacagaaatctggattcagttttgttagtaaaaataatctttccaccagaaaatgtaaaaagctacattgttcaggatatttggacctattcatttcaatacagtctgataggtgggggtggggaggggagattttgagctgtgcagttttaatgaaatgtttaaggctgaaataatggttctatayagctcttgacatgatttattttattttgtgtcaatttgcctaaaatgtgtaatgttgtggcattccactgagggagggctgcaaagggctctcactgagtcatggattataatttacatctagaaagtctacacattccataattatggtgtgctatgaattagtagagtaatattgaatatccctaaaccccttattatggcttctcacttgaaatatgttttcaatatacatttattcagcagtgcttaaacatggcaagtcataaacacatgctttttaaatcatgtggctacattttcttcctgcttaaatgtaagatcagatgttattaacagcagaggggcaggagacgaaaggagagtgaagctgttaaaaaacaaatagcacttttcattttaaaagatatgtctcctatttatgatactgtttccccaaagcaaaagacggaagagtattttagagtgtcgtggtagtttctctagtgataatttattttatctttgtagcactttgcctcccaagagtgtttgaaatctgccatatataatgtggaaatgcttgaccaactgatttggttagcaaatggcctctggctaacatccaggaagaggagctaaatatttaactctcarattattatgaacatggtccaaatgtctggagccctaaagaggcttcctataactgcttctaatgtgagaatttaacttcattctttgttgagagtggctcagacaccgagccacaagatgagagaattcctcccagggaatacaactgggcattttggaaagaaaggcattgcttttcaggacatttaaagttcacttcagaggctggcctcagtactcttgaaccaacttgagtcctatgcttgcaattcagcatgctgacactaggtggcaggcaaaactgaggtcatgccaaacttgtatagctaatgagccagaaggtattatattaaaaactcaaagagaattctttgtgaaagaataatatttgccaaaaatactctagaggctgcctccacttttaaatctaatgcattcattgtaaaggccatgttaatgcacactaacaaaaagctctatttttataaataaagtgaaaatatgcagttttatgggaaggggacacattactttgtttatataacaataatattatactttataccactattcaataaggtataataagttctgtaaatgtggttatgttttgctagccctgaaaaaatatgaaatcccatagataaatatattggtatcaggaaatactggaatgtgagaggactgtaatagcaccaaagtcaatcgaaaacactaatgagccaaacttaatgtgtcattagttgcctggatagtggtgtattatttcacaaaaggatagcattgtttattattttgcatcttgggcttttagttctccatgggtagtatagcacatggaatgcaagataaagtttggatatgtttgattagtgagaagtgagggaggagattgtatcttatgtgccagccagtagagtaagtacttactttgcaaacgatatatctaggtttctactttgttgctttcattctgcccagtcattggcagaaatcataaaacgatcccatagagggagcaaaaagaacccacatgattctattagacaatgctaaatgaaaaagaaaaccaattaacaaagtttaagtttaaagcagggactatctgtataaataagttttaaattatgtaattgaaagcatgatttaaagtaatgtaaactcttgggcaagagtaaatgccttacttcctaacacttcaatgctttgaataaatctttaaatcctggttttctcacttgtgatggtgagactcattcctgttgaaactttcagtgctcttagggggcttctcagagttcttcctcagaagcagcaataagtccttgctcatgtctagcaatttaagaaatgcttttactatgtgccagttgaagaaatgcctgactttatttggctcaatgcagctccaacttcctagagaattaaaggttcagtttattcttttataatcaatcatcagaaaatgagattattaacagtatagactttggaatcagtccatgttagytgaaaacccagcttcaccatttgttgacctaagactttgagcaaataaccaagagcatttgtaaaatgtgagtaatcatagtacctaccttaacagtagagaagtttggatgggtacctatgtaccgtgcttgggtactttgtacctggtatayagtaagtactacattcaataaatattaattattattactattattaatgggtcctcagttaccttactgagtctgagaagtactcagggtttttatactttttttccttaatagcataagtagagaaaggtcactgctcacaagccctgtgggaatgtcatgtgtgcttctcccgctcttcctgcttttccttcttccgtcaagtatctgggtgtaacaggttcccttatcagtggctttcctgggccccccggcacagtgtttgctgaacatacctgtttggatacacttttgtgacacaggtcatagtttttgtttatttctttttctttttttttcagaagaaactttgtgaaacacatctaatcacatttcaggtttgtattttgttttatccaaagagtccttacctgttggctttgggactagcacctaagccatcatctttaactaaaagatgggacaggctaatgctgggctgcyagtgccctgaacactggaagaagttccagcttctgctgaggaggtggaggccatcactcctccagagacccttccttcaggtgcacccagatgtgtcattctgaagcccagaccatattctgtatgcttgccagtaaagtgaatgaaaatgatcaaaatagccatgtggctgtaggagaagcaaaatggagcaaactggatgtattgcattaatgatatgcaatggaaggaggagaaagtagtcaggtttgagttgcccagtgaaggaaaagcagcaaggacaggggcttggttttcactccactattagccaggcaagctgagtgttctgttggttacttaatttacgagggctttggatcagtcattctaaaacttgttcctcttttctttttcttaattaatgaatgttgatgaattctgaaatggaaatcttttggttggggtcagtggtcacttgcttggagtgatgtcagggcagtattgtctggtgtttagggacacaacctagctttatatcttggctctaccacctgctggccatgggacatcrggcaaataacctcttcatgtctctgtgtccttatctctttttttttttttttatgctttaggttctggaatacatgtgcagaatgtgcaggtttgttacataggtatacacgtgccatggtggtttgctgcacccatcagcccctcatcttcattaggtatttctcctaatgctatccatcctctagccccccagcccccgacaggccctggtgtgtgatgttcccttccctgtgtccatgtgttctcattgttcaactcccacttatgagtgagaacatgcggtgtttggctttctgttcctgtgttagtttgctgagaatgatggtttatgagttcatgtccttagcagggacatggttgaagctggaaaccatccttgtctcttaaatgggaaataatatgaatccctgcttcattaagttgctgggcaaatggaatgaatacagatggttcctgacttaggaggttggacttggaattttttttattttacagtgttatcagggtcttaaatgcatttcaacttagaatattctcaacttgcaatgggcttattgagatgtagccccaccttccatcgtaggtcaaggaaaaagaagtggcttacaagagttccagatacagagaaagctattagcgaaggtgaggaggacataaagatgacaacagtgataccaagtttccccatccactctcacctacccactatactaaacaatgtttttcctcttacctgctattaatatctcaccattcaaaacatattcagtagaacccaactcttagagttgatagggaaacaaaaaaataactaaatctcattttaagaacaagagataaagccaagagtaggttaagtgacttttctaaagtcacacagctagttagagacaaagccaggcctagataccatagtctgcagaattccagtctaatgctaataatatttgtcatgctaaagacacgacactggaataaagaatattaaagtgtgcatgcctcagaagacttagcagggtctgttccttgaaggctgaaatggaagttagattatgccaattcattacaacctcataagctagcttacagtaaaaacccaccatgggggaaaaacgacaaaatggaattgagacacttgaaggagggtaaaatgttttaaatcaaaccattcgttagaaagtagagtacaaacctagataagatttgtggtttcaaaaaacaaacaaacaatcaacaatttttatctctgggctctggtggatatggggggattcgtttgttacagctaaagttaaactgcagggaaaaataaaatgcagatgtgttgctgtgttgagcaaatgcagctgggcgtttctggaagaaatgttctctcagaaacttatcactgggagcagaaatggtgaaaagtttgtggggtaagtggcagagggttcttcatgggagttttatgaaagtcactgtgacataggatttttagaagccctaggaaaagaaagttggggagttttccagtgaaatttggattgagaaagaaaagaaacccacattgtgctaaacaagatggtggatccagttcagagaaattgagtaacagacgaaattcccagaatcatgagaaaaactagtcaaagacttcccctggggagcacccggatcaaaaagctgactccggggcctctctmtacaggttgctgaggaggggcctgctgcagtaggaggctggaaggggtggtttggaactgagtcaagaaaagaccccaaacccacagggacagaggaagttgaaagaggggtttggcttagtggaagggaagggaggttggtcaagagaggcctgctgacaggaaagcggctgacaacaagaagcatctggaaagggccatttgatgctttaagctcatgccaagctaattgagtaatgtgagcttatgttcttgtaaattacttcaactgtatatagttcttcccctgagactgtcttactctgcttttcaaaattggttgtgtgtttgaataggccccgaatgtgctgcactctgtttgcgtgcacacacaaacgtcacttatcgatatagtctacattcgcaatactatgcactgactcattcagttttcacaaaattcccatattgcagatgtagtcactgaggctcttgtggggctgttttactgtggtgcccttgattcctaaccccacattgccgtatcatgaaaatgcctgtggaatgaggggactgtgggttttagtgtgtatttctgcagctcccttttataaggaggctctcttctatgggcccaactctgaatcatgatgccgtttgatttacgactstcttcttgaatgcctggagcagaatccctcagttcataaagctgaggacagaagttttaactataatcaaaatgaagactcttgctcttctttacccagggccttctcccaacctgtatctcctacctcttttctctcctcacagacagaccccaaaatcttagcctgcctattttgttgttgcatggaagtcaggatatctaggtcagtttatccaagtagaaagtgctactttactgagttaactctgtgaaaactgctgcctctttactttatagaaacaaaatcccttgtgtgcaggatattatctctggaagttttcaggggcttccaagtaatcagttagatttaaaatcaacaatgaaacttttttttttaagcaatggtgtttcccagtaacaagtgtctttttcattgttttatcagacactaagtcaattcaacctttttaattgtgaaaggactttaaaatgcccaatgctactacgtcagtgtccagaaagattggaatccacctgccaggatgggaggtttacacccatttcataattatatagaactttcttgttattccyataattcgactcagttatatcattaaacccatctggttatcaaaaggaaagggattgacttggtaatgcgggctccttttttttgctaagcatcattttgaattctatctttacatccgggttttagatgtcttatarttgtgatttttaaaatgtattaagatatagaattacgttcataataatattcttcaacagtttagagtagtgctattcaaagtatggtccatggaccagagatgtttggtgtgctatttgttactaggccccacaagttagggcctgacgtggagagtaggcatttagaaacttcagcaacttgatactgctgcaacattcaagcagcatttcatttttctagtagttcatctttactgtattttataaaagtatttgtccatgataaattagaaatggagggaaaacactagaatcatggtccttcatcacaatagtttgaggaaatctattgtataatatacatcatttcatttggtgcaacaccgaatgagatgctgtacaacaggttttgtgaaggagatagggattgcattttaagccttatttttcaggtaaatatacttgggttcaaagaggtaaaagcagttgatgtcacattttagttcctcttacccacagccagcattttccaagatactactctgctaatcacagacaagttgaagcaagcttaattacaaatagtcttgcctaagctttttaaaaggtttctttgtgtataattaaccttgaatgatctatgaacagacaaccgttaatgacatttgagttctctcaattcgtacaaccatttagataccaacaagctggccagttgcctgtgctttccaaaacagttgaaagatggtaactgcatagaactttaaggtttgaaagagacctaagggaaaccgcacagctacctggcaatgatcctctggcagacacatcagttaccatgggaagaatgtctcatggttgacagcattctatttgagsgaagcagggacaattagaaagtccccacctctacctatttaactcctacctgttggccctatatctaccttctcaaggtactgagaataattctcaatatttggtcataggcattgtgtcccttctgaaacgtcttcctctacttcaaaccaaacatctctaactgtttcagtggtcgcttttgtggtatgcttcaggaatgcccctcacccacagactcaccacctggccacactctctctctctcttttttttttttttttcttttttttggcctattttttcccctttatttcttttttttttttctcttgttttgtatttcttttttcccccccacactctctacattctctttagtcaatgtccatcctaaaataagagagtcccattaatggatcctggtattccagaggtggtctgtccagagtacaggaaaatgatcatcttcctcgatccatacactggatttcttatagtgcaatctaagactgcattacttattttgtatccccatcacattgatgtcttatacaattgactcttaaacaatattagtttgaactgtgggtccatttatatataaattagagtgaactgtgtgggtccctttatatatgaatttttttcaaccaagtgtggatcaaaaatacggtatttatgggatgcaaaccccacatatacaaagggccaacttctcgtacacacaggttctgcagggccgactgctggacttyagtatgcccagctttggttctacacaggggtcctgaaatcccctgcatataccgagtgacaactgtaaaaggataataatgctaagtccttttcatatgtatttccttagttgattggttattttatttattgacccagtgatttagtaattgatcaattccttccttcactcaccatccagtgaagcatccagccagcgagaccatggaattctgtaatatctgcttcgtgattttaatcctgtaagatatttcgagaagaaatcatgcttagtggaaggaaagyggtttaggctttttaatcttcctagttaatttgatctggagcctcagtgtctgggcaggccccaactctttggtccacacctcggggtatggttacccaattaactaattcccaactagctaaactctctagaatctggtttatcagtgagctccctggatagacactttgttatttttaacttccgccctcatcctcctccccttttagaatcactaattaaggaggtctctctactgtgagttttgtgacctctgtttccctggtaaccagattgcatatctgattgtacccagcatcccagcttctgatgacatggtcacagcgtcctataaccactaaggtgagacataggcaccaagaaatagttaccagacattttatatgggttgccccagggtgctgtggatggaggaggagtgagagagagatcataacattatttcacatgttataatgagcatgtatgatttttgtaattaagaaaagtaataatagaaaagattaaagagaaggaagaaatcactcctactagcttgttggctagggctcattcaggtcatggtgggggcttcctccttaatggctgtcatgacccactcatttcttaactccttgcattctggcttctaccccaaccactctgcagaggaaaaaaaaaatgccttttttaagttctctaatgacctaaatcaggggtcagtaaactgtggcctgtgggccaaatctagctggtcacctgcttttgtaaataaagtttttttggaacrcaaccatgcctattcatttatactcrttgtctaaagctgctttcccaggacaaccacaaaattgagtagttgtgacagagatggtatgacccgcagagatcattttgctgacccttgctctctattgataaatccattgatttagccactctagtggccctgaatccctcctcatcctcttcagcctctcagctgcctttggctctctccaccaattcttgaaaatactttccctcacccactgtgactgaattttatttttctctccttctctctctcagtcttttttctgtctttcgttctgacctttactctcctgtaatcatgcatgaggacacagatttttgtcttttgtgttcctatctacctctccagtgcttgcaacagtccctggcatgtacgtttgttgaatggatgaatgagtctagctctgtatggaggagagttgaatcaggattcttttgcatcatcttgcagaaaagaccagttcaaactttacaagtgaaaaagtggatgcccctgacagtcaaaaagggagagtttagcttagaatcatgaacatttccccttacacagccgaaagcctggatattttagggaacttctttctagtccattggccccaacacctcactccttattgtgacatactgtgaatatgtgcatgatgtaagcagacagtgtaaatatcctcctctttaccttcgaatttggtctagtctccaactgctttacagaacaaccctccggccccttcctccacagactcctgagcccctctgtggtcaccaccatggtactagctgagaactctgctattcgtttcgtgggaggtagctgtatttccaccatctttgcatagctgacctcaatcatgtttgttaaataaattgtcaactgaagaaggaagaaaggatgtaagagagaaaaggaaagaagaagaaaggaaagctaggcatagcttaagccttttattaagattagggctggcaaagaagaggtttcactttgtgtgctaatgctgaccaattagtagtgatcagctaatgctatcagctaatgctgatcaattgtatcatcggattctgaggctatatttgtgacaagagctatgatcaattagtatgtctgctatgggtgttgaaagaaggagagctgtggcttacaggccatgtttttccattctacttgcaggccaataaagtatacaaaaaatcttttaaaaaatgattatgtgagtagaatactaggtgcctgcctttggggacctcctcatcccctgtaataagtgactggatttttcatcctatcacaattaaacccaatggggtagaggtaatttttccaaaggaaattagggtggtggtaaggtagagaaatagatgctaagtactgctcctcccaatcaaccaaactgtctagggtccaccacagggagcaatcaagagtctaggattcctactgtagtattaataaaagctgttcatttgtcttaactcatctaagaatggactaagacagctggaatttagccaaaatacaaaattttatgtaacgaagctttgcagctgtgtgtgcagatatttctgaaaaagtcatcatccctttgccctcctctgttcccttgtgcaataagcatttccatgtggctgtgaacttgcctaacagcattagtaactgccatggagcaggtaattagtaaatttatggagcacttactaagggccctcccaagtccttacatccattttcttacataatccttacaataactctgtgaagtgtttagkattgtttctgtttgcagatagggaatcagaatcaagtggtgtgttcacatagttagtggtggtggtggtaatctgattcccaagcctgtgctcttaagcactcacaaattcaagattataacatttgtgtatacccatggacacaactgcaggtgattttgccacttaggaaacactggtaatgtctgttgacatttataacacctggaagagatactagtagagccaggaatgccactaaacctcctgccaagggccttgtgacaaagaatatttggccgaaaatgtcagtcatgccaagacactcatgtgtacatacacatgtacacgtggtttgggaccacctaaagtatccatagagctttggggtctgaacagataaaagacttggcttttaaaagacaaagctcactgtgagtaggagctggctgctaatattttcttaattaactaggagttgccagaaagaattttttcctaaaggcacctcgctccccccaaccagttcctactctccttgacatacatcctccaaataagacagaaaattcagtctgttcaggcagtgaaaataattaaaccgtgtacttcaagatggcccttccatgagtgcctcaataactctgcagcttggaggggcaatgtggcaaatccactcattctgggtggttggccaagggggtcacagttgtcctataatcagattatgttgctatatctgcccattggccatctgtggccatttggggaactattaagcaagcagcgctgacctaagtgagatggacgatggcaatgttccttggartgatagattgaccagagggatggtgtaatagcctgccagtgggggctagcagatgggcaactttgacgagaagagcagtcagctccccacagggaggagcaagattggaaatgcaaaagtaaccttccatagatgcacccccatgatcttcaatgaagagcaagaaccaagcctgtgacagacgcaagcttaacattagaaactgcatatggcttggccatgtattgaaaaatcctttataatccctttcttgaagctattttaaagagtaatgaaaaatgtgtgtaatcatgatgtataaagatgttcattgcagcattatttatgctagcatagagtgggtaataaaggactgacgggaaaagaatggctatacaaaattaattcacactcatagaagggaacactatactggcattgaaagtaattttcttccaaaggccatttaataacatgaagaaatatttacaaagttaagtttaaatgaaaaacaagatcagaaaaattggatatattatttttgttgaaaaaaatacataaatgcatagaaaaacaataaaatgaatcaaaatgttaatagggcttattttgaggacatagataattaagatttatgtattcttcttagcaagtttcagcaatttctaaattgtctacagtgagcccatgttgttttttaaatgatacttttgtaaaatttcaaaacaaagaagcttttccctggtactaataaggttctcatgctatatggagactatgggaaattagttacccaagacctagtttagcagctatcttcaccaaaaaccaattactacctggaaggttacttcagttagttcatctcatgccctgtgttgcttgtcagacactgatgtttagctgaacacaccaaaaaatcctcctcctcttccttctcctggtagattgtagaactgcycatctggaatttgggaaacaggcagacttgtctggctcatttgacatggtcattcccccgccccctcctcaaaatgccacttcagtaatctacacattacrggcawtatctccaaggggctgctaccttccctgagcactttcaacggmctttctttttgccttccctctttctggagtgtgtagatttttgtcctaaactgaagtcagtttttcaagcagttgctatgacagaatctacagttgtcgtagttgcactaagttcacttgagctattggtttcaagaaataggatgtaagaaatcagggattttattctgttgtctgtacattttgttgttgttgttgttgttgttgtttttcttgagacggagtctcgttctgtcgcccaggctggagggcagtggcatgatctcagctcacagcaacctctgccgtccaggttcaggtgatccgcctgcctcagcctccaaagtagccaccacacccagctaatgtttgtatttttttagtagagatggggttttaccattttggccaggctggtctcgaacttctgacctcaagtgatccaccctcctcagccccacaaagctgtgggattacaggcatgagccaccattcctggcctggtggctaggcattttctatctggcatacctttgtacttttcccttaagaaagatggcagtgatgggctctactgaaccacaaggaagctctctgctttgtctccttgcctctcaaaggtgctcagtgtggcttagatatctgcctgggtcagtcctcctagcctactgtcattcacttgtgtcctgccctcccaagccagaagctgcaggagaacctagactttgagtccaggtgtgttacttgcagtgaacagttctcctcagacccagctggccatccaacgttcacccgctctccactctcattccctccgtgcccctgtgtgtgcggttggcattgctctgagtagcgggtaaagccttggggccagggctgtaaaggtcagacagaacacctctctgcattgttcctgtcctgcagctcctccctgggtagctacaagcccacagaccaagggctgcacccctctctcctccctgcccagcacacagcctcccttccagatccttcatcgacaacaatttatgaaaggctgaggatgtaccaggcactcttccgggtgctggtgataacatgtgaagaattcttgaaaatcctgccctcctggggcttatatcttttgggtgggtttggggagaaaataataaagaagacaaaacaagaagtgaaataaaaccaggaaggggaatcaggttgtaatttttgatgaattagttaaggaaggccttatgagaaggtgacacatcacatcagtaaagactcaaaggaggtgagggagacagcagacatctgggaggggagaaggggagagagggcacccaggcagagggaacagccagtgcagaagcgcttagctagagtatgccctggcatgtgtagggaccatcgagaaggccattgtgtctacaggggaatacatgatggggcccacagcaggagaaggaatcagaggccacaggaagagatcctgttcacatgggctttgtaaggctgtgtgcgaattccagcttttctctcttacttcaatggcatcagctgttttgcgcagaagagtgccacactggggtgaatagcatccaggtgtctgctccgtcgagcacagactggaggggagggcagggcagaggcagagagagtgtgaggaggctacagaagctaacccgatgagaggtgctggggccctggagagcagggagcgatgagtggtggggaggagtccagtattcacaggcctctccacccctcacacattcaggcccagttgcaaggtagctgtggaaattgaatggggatcagaatgtcagcaactcgtttctgataatcactgtctagtctgagaaacttattagtgccagagaaaagctattttcttttgaatggaaaaaaaaagagtacccttttaacaataatcaaagcaacatagggtcactgcagacaatttggaaagtacggaaatttgcaaagaagaagactcgaaggaggtgagggagacagcgagggatataaatcataattctatgttgtagaaatgtcttactaatatttttatttattttattctgagttttttctcggcatacacacacatatttaaattttccttacctcatgttttagtttaacattgcgaatatttcctctgtgtcatcaaatagtctttgaaaagattgttttaatggcaacataatgttccttcctactagtgtgagttaacttatatagcaatttgcttagtggaggatggggcttacaggtgcagccttgatgggcttcctaaaatttcacccccaaatcagataagcttagctacctggtaacagcagagttgatacccgaaggcctcctccaagggcagagcctgctcctgggagcttccgtgtcatggagaacaggcccatgttctgtttcctgcaggcagacacacatggagaaggcctgggagagtttgaacccagaattctaagagcctttactaagactcaccaatataagcctctcttcctccctgggaaaatgagaaagagaggtagagaaagaggccaggagtgtcaccctggtgaaaggcctgtctgtacatgaaaacccaaggccagaaaaacagaggtctcctcccaccattggaatttcagcagactaatggatgtcaagtacttggccctggtaaatgctcaataattgccatcttcccccttccactactgttcccaggaacataccaaaatttcataaaatgaatagtcccatgtgccaatttaatgggccaagctgaattattgggcggtcattgcttttctgccaacctagtgaaccccctgcagaaagcaggatgagttcagtgggttaccctttgatgtcataagtcatccttctcaccctgtgtaagctgaatatactcaaaaggaaaaagatcaatgaacccccaagttggcagtgtcttggtaacctgtgttggagtttwataattgtttatggatggatgtatggatgagtagatggatggacgaatggacatagagaaggcagagagggaagaaaggaggatagacggtgggtggatggaaaaaagggtaaattaagacaaagtcattgtatccttttttttctctgaagagatatgggggaaataatgattttacataagtcattgtagtcttttttctcaggtgaaatacaaacccaatataaaaacccctcatttctgttggaagtaagtaaagagacacattgtgatcttagtagcatattttatctgtttgagccccagaaaggaagatgggtgattttctagcttgagtgacataaatctgtgccctccccctgtaaaatatattgtcatttctgtgattcatttggcttttttttttttttttttgaagtggactgtggtttgtgtgcagtggatgaagtaattggagtgagtgcttctccctagagacagaatcaatcactgtggtagaagatggtgacattttagaaagaaactctgaggaaaatgtcatgcttaaaaaattagatttaaacacactggctccagattgatttttattacactcaaatggataccctgattgattatcagtcttacaaatgtttagcacatttctcacttctctaataatcagaataatctaattttcaatgtcatttaatgtactctattcaaggttataatagatcatatttctaataaaacacagcaattatgtaatgaataatacaggaggaccagcattcagattcccttgattttaaggcagtgccaagggaaggtcttagacaaacccatttctttaaatgtgatgcacattccaagtctttgcctgcattatagaggatgtttttttcctgctgatgatctgaatggaactttgccagaaaacttgacctcccccgacaaaaaaaaaaaaaaaaaaaaccttttgagaggcagcaagttttgaatccttttttaatatgtgttatcagtgcacctgaagaaaagtgacaggttgctaagttatttattgagtttctctagtaattgctgctttcttcccattttttatatacattcccaggagaaatactatattttagttctaaaaattttttccaatatccattatagcagcagctgacattatagatgttttagggtgagccacaaggtatctagtttggaggaagcttggctctatattttgagcccaatacctgattatgtttggttttttcaagagacctgactcacgttaggaagtaacttgtactttttctatttgtggcttctagccaattccagtcatgtccaaatctaggttagtaattatgaattcctttgttatggcttacagctccatttgatctggtatgcgtatgaaatggtatcaaaacctggtggcctaacaagcaatagcacttaaaaggtttattgttttgtcccatgttcttggtgaggggcatttaggggcagcagatagaacaatgaaggctgaagaggtagcaggcctgataagcatttagagactgaaaagaagggggccaaagcagaaggcccacttctaagatcaatcctagatgaacctggcagagtgagaaattcagaagctctgaaggctccagaagatctaagcagaagtaattgatgggccagtactaacaagatgccatttaacagaggtgaacattacgttctgattcagactcggccaaattggtagaggaaatacaggttgggaaggatcaagctgaggatctgatgaccagaagcttgccatgaaccaactcggggtagtcacatgtcctcccttttaaggtgtttggttaatcagatcatgaaagaccataaccctctgtactgggggctgatcagagcacaccttgaaacattagtgctttttattctgagcacctcattttaagagggaagttacctagaactggacattatccaaagaatgttgaccaagatggcatgagatcataaagctgtgtgctatgagatgagaaaaaggaaagtcatagtttgctgccatttattgagtgctgggccttttcaacacctttatgagacattaccattctttcatggtcatggcaactgacaccgagattggccagataatttgccaaaatttacacaactactaaagctacacagtcaagatgtaagcccagctgtctctctctctctcagcttttgtgatctcaccatatctgagattttctatagactgatgattctagatgatctccaaggtcccttccagctgtagaattctgatggtctctattcaggatatgagttcaaatatcattgcctgatacttggaaacattccaagcataaagagagaatactgtcttatggtactcaaaataagatgagattaacctgggaacacttgctgcttaagtaaattgaggttgagaaaatgaggacccctttgcagttaagatacttggcagtaaaatctgtctacatttttgaaaatattagttcttgagacattatgcagtttcctaaagccttgaggaaaaggagtatgtgtgtctgcatcggcctgccttagtctgtttgggctgctgtaacaaaaataccatagactaggtggcttataaataacagaaatttatttctcccagttctgaaggctgggaagtccaagatcaaggcaccaggagatgcctagtgaggtcctactttctggttcatagataggtgtcttcttgctgtaacctcacatggcagaagggggaagcaagctccctcaggactcatttaagatactaatcccatccatgagggctccaccctcatgactacgtcacctcccaaaggcctcgcctttgaataccatcacatcggggattaggtttcactttatttaaaatttaatttcattttaagttctgggatacatctgcaggatgtgcaggtttgttacacctagcaacccatcacttaggtattaagcctcatatgcattagctatttatcccgatgttctccctccccaccgccacctgacaggccccagtgtgtgatgttcccccttctgtgtccatgtgttctcattgttcagctcccacttataagtgaggacatgtggtgtttggttttctgaacctgcattagtttgctgaagataatggctttcagctctatccatgtccctgcaaaggacatgatctcgttcctttttacgactgcatagtattccagggtatatatgtaccaagttttctttaggggattaagttttaacttgcgaatttggagaggacacaaacatttagtctatagaactgactgttttaaggggttaagaaggagatgacctacaaaattaatgacaaaaatcatctttgaaggcttgaagggcagggtcttagcagagtagttaggatgggaaggagaggttttaaatgctgtcctcatagtggggacctatggttacctgagcagttcacaaggtattatagggggcccagcaagagggaatgagtaaggagtcatctgtggaacccggcagcccatttgagctctaacagtactgtttttactttttactgttcattgtcatatatggtattttcccacctttggaagatgagctattgtctgcaaagcatcattcaaagagggagtgagtttgagaaacagyagatagactcatcagaccctggtagatatactggataaggaagagaggaggataggtctgcctcttccatttgactcatgggccctcagatggattatggtgccagtcactgaggtggcaacatggaaggagaaagagttatgtggagcagctaaagagtccattttagggagaagatcaatgtgaggtgccagtgatatctaatgggcaatgggatggtcacatctgacgcttaggagaaagrtctgggctagagattgagattcgagtctcctggatatatgtccttaatagtggagggcttgggcatggatctcattacacatagaataagaagagggctagggacactcccagagatacagaattctttagatgggctgccagataggtcttgtggggatcccaggatgcagatgtctcaagttgagtgtttcttagctttctcaatcaagccttcaatctgttttccataaatctggaagttagcaatagttctgagagaggggaatcccagtccatgcctacctgcattcctctttttgaagttagttagctcaaggcattttttttataaccatgtttcatagttcttgctactttttaaagtcaagaggcatcctaaaaagttcccatagcccactgagctggccctttttttaaataaacctggttatgaacaagagccctgggatgagacagcaaagccaataatcatagttgaccacgggcccctctgtagtcaaggtacatggtagcaaaaacagwctgtgtgattaaaaatggcagttcctggagctgaccaaccattgtgcaatttcctgaatttggtcaaaagattatagggtaagtgggcaaacaggctgggcaagggaaagtcagcctggtgaaattaatgagaaaaatattattttagagtccagtgttcctttccagcttaagatctagacaaccttaaatgcatgcacagttaaaccatatgttctcargataatgaaaatggctggggttgggggagggcggccaattcttgctgactgtgctttggttgttaattggaagggacttggtaaggggcggggggaacattctcgtgccagtggcttgttagggcaacttgacctctctgcctgcattccagatatttccaagatagctggccctgctttgcatatatctagatcaagtgggcaccccaaatctcttagtctggtttcctctctcaagttcttagaaggtcagttctcactcttcacctttctgcctactaaaatctacctggaggagataatactgcacccgtctaaaatgaaccaagggtatgataaaggtaatgaaagaaagaattttgaaatgggtgtaaatattcaatgtctagggtttactacaaaataatcttgggaggtgtgggagtaggaagaaaataagtttggccatgagttgaccattgaagcagagtgttgagtgaatgggggctgttacatcatggtctctactttaagtatgtctagattttatgtagcagatctgtttaaatataaatacgtattccagttgtcaggactggaggaattaatgacataccttttaaggtatgattttgtgttttaaagcttgaaaatgaaaaacagatatcctacgaaggaagacgggcaaactataattcacttggtgaatactatgaaatgcatgaggagttaaagtacttacatattcaaaattttagttctatagagatgatttttttcctgccatcttttgctttttttttttttgaaagatttgagtaaataaaacacaactatattgattgctacctacagacttttctggctacctagtctctcgttgccctttcactggatgggagcctccttgagggagggtggcctctgccactggcgcccaggcatactcttcaccacccctcaaggaatgattgacaggggagcagagaacttttctttagagaactctaggaatctttaagcccatcctcttcatctctgtgtgatttagacccagctatttgtgaggatccctttctgaccacgttattttccaaaggagcaacaggtaatgcaatggccttggaaagtctttggatgcttataaaggaagaattgtggaagaactctctttcacatcaccaaaaaaaccagtcatctgaagtgttgcttcctaagaatgtggagcaatcaataaacccccttggagtatcttacatgtcgacactcccttggccttgataacatctgccctccaaaggcatttggcgtgcatctgttgaacacatttgtatggattgtcactgggtcttcgctgcaacctggcaggattggacgccatccttcgttcccaggcctcatgagaatcgaaacatccaacatctctcaggcacctctcaaataccagaggtccccgactctctttatgttcccaagatctttactcatgctttcccctcagcctagaatattcttcacctagttaaacagtactcggcccagacattctgatgcagaatgttctgtgcagattttctctggctgacttcccactccccctccccaactagaaagaagcccatgtcacctgtgtttgccacactgtttccccatgtgttttcagggtgtaatgtcatgttaatctgtgtttggttaggtgaggaatgtgtgtgtctacctctggagcaggggtctacaaatactgcaggccatggttagggtgggggaggggatttcccgagagaaagtatctgtgcgtggaggtgtagggcaggggaactcactgctgtgcagaaaataacaactgacatctagtatgttgcctgatagctgaaataaaacaaaaaaacatgagggggtgagtattaattgttttattttttgttaaatttattttcttccctaagtttgatttattgcacaagcaacttcttaacaatcaaggacgttttttagtgtacaggtcagccaactctgcagtccataggttaaacccggcccactgcttattttggtaaagaaagttttactgggacacagccctgtgcgtttgttgacgtgtagtcctggctctttttgcgctacaagggcagagttgagtagtgtgacaaaaactgggaaggcccaaaagcctacaacatttctatctggcctattaggagaaaaatttgccactcctgggctagactgtgactcagtgaggaaccacgtctgcctcttcaccatcaacacctccagtaaccctcacagtgccgggcacagagttgcataggttcggccttagtctgttttctgttggttataccagaatacttgaaactggataattcataaagaaaaggaatttctttcttactttgagggctgagaagtccaaagtcaaggcactgcatctagtctttttgctgatagggaatctctgtggtgtcccaagatggcacagggcctcatatggcaagaggattgggtgtgttaacatgccagcccacgtctctcttccacttcttataaagccatcagttcctctcatgacccattaatccattaacccattaattcataaataagttaatctactcctgatggcagagcactctcggtccaatcacttcttaaaggcttctcatctcaaaactgccacattgcggattaagtttcaacatgagttttagaggggaaaaatattcaaaccatagcaggttccctgtaaatatttgaatamaattagtgaatgaatgaatgaatgagtaaattgacaaatagctactctagcttgtttatttaatttatgggaaaacttttccctcaatacatgcaatagtttctgctccctgatatctaaaacacttgctccttcacctctttcagctctcttctcagatggcccctcatcagagaggctttccctgccacacttcacagtacaatgtcccctgtcgatctttctctcttccctgcgttgtttttcttcataacacttattacctgtcattatattggatatgcatttgtttatcatctgcctcccccaagaagaaaataaacaccaagaagctggaaacatcttttatcaccgccacatcctcagtgcctagaacagtacctggaacatagtggatccccagttaatttttttttctagctctgtcaggattaagttttagtcatgtgtgtatcatttagtcagcaaatatttgaaaatgaatgatcacattaagaattgactgcacgcagcctaggatttctttgtatgtactctagttatttcttggatgttaactgccttccccctagatcccaaacactgtcttactggtactgatcttacacccacaaggtatgggttggtaagaaatagatggccccggggatgttggagttctctactgcttgctgatctaccattgcctttcctctctccaccaagggctggaggctgcctctaccttwgaaggcattagcagatgtcttttttattaaaagggaaagaaagcccattctgggcatgggtgtgggtgttaaaggaagggaaaaggaagggcaaagggaagtggattgtgaagctctggcaggaacgttttgtatgttgtttcttggacatcttgtatttttttttttgaccccttagcagaagcattcccaggaatagaaactggattttctgttcatattagacatccaagactgtggctgtaagctatgcagagaatggtggagatggctttctttcttttccaaatgactctccagagaaataaatacctgagaattaaagttctgtaggccacaaagaagatttttgtgaactaaataggattcagcaatcctttacagacagtgcaatttgggatgatctatttatattgagaaactgataagttcactcaggggaaggctaagttggctacaattctagccaacacttcatatgctgagactgacctgggagctttggcttatttctgctgtttcattttttaagattttcttttagtaacacatgtggactgagagtgacccctcaatggcattcaggacaaccaaggccaagtagaaaaattttctagttatagtcctcattacattcttgttaccaacactaatcttttgaaaaagcaaaaagttttaagaattattgtatgagccatatatagctttggaattagatagaaatgggttcaaattctggtcctataaattactggcttaaatgtgacctttaaagtctcttggccaaagtttcctcatgtgcaacttgggaagtaaatcatgccattgaccacatggggctgctgtaagaattaaatgagaatgtatgtcatgcacttagcacagccagcaccccgaagggctggggttgatgacagcagtgatgttgcctgttcatggcaaactgtccttacagctgagggagatgcaagagaagtctgggtcacacaccacagccctaatttgagaaactggtctgtgacagttggcaattatgagtttgaatttccataatggattggaatttctctcatctttgcatttcaaagccaagggcaaggaatagttattattttctcatagtaattcttgtaaacaattcctgatgtgcaaggtaggtcaacaaattacatggaaccattcttgcataaggcaktttctcacaatgacgtgctgtttgggtgtctttagagtaaacttgaaagaagttctccttctttgtgttttgcttccacatggcattgcattcacacacacacacacacacacacacacacacacacaattgccatgaaagtagagacttctgctttgagttcctctataggttatgtctacatcagcatctgttgcacagtagtagctcaataactattagtggaatgaataactgagtctatttcacattaagtcaatttctagaagtcaagagctagaagaaacaaaacccggagggactaaggaattcctcttcattttccatggataccattccaatcataaatgggcttttcccaaggctctctccrcagcctatcacttctctggagcctgaaacccagatagccaattacataaagcacacactggataactccacttgggtggcacatgggcacttggaattctaagtggagaaggaggaggccctttttcctcctcctttgttccctcaccatcattgtgcaagctggaaacccttgacccttcctgctgcctggcaccttgcatctgctatcctggcacttccctacagtccctccctggtttagacatccctcttctctcactcggaacttctagcaactacttcagtggtccctatacccctaatcatttcttcaccatgaacagtgactcgtctaaacagcaacccctaataaacttaaaagccaagtctccttggccaagttcacacaatcacatgagctgtggtccagccacagcccagaactgcaagcctcaccctattccctgcagagctccaaagctgccctgttgcttctctctaggtctgcaaactggctctcttttctgcctggaaagcactcggttctcccagcctttggttagctcaagtctcctgctttggatatttacatagaatttaagtgaatgcatatttcaagatctcattccatattgaccctccagtgagcctctctctgcaaatgagcaattttggattctccggsaagttcaaacagcctttttgtgtttgtaaacatgggtagtttcactgacttctcctacaggttggattacacaaaaaacatgttttcaagcgcttggcctcaagtttattttctaggctgatttttgaaggactttatctggcctcctcttaaccttccccacccccaagtctggcttccatccttattgctctgctacaaatgttctctcgaaagtcacaactttctccattgccaaaaccaatgaactttgctccttcttcattctttctgactggcggctacttgaacacttggccaggctgctgctgcttcaaattcttttctccattggtttctgcggttttttattccaatttctcccacagttcatctgctttcatccccgtatccttttccctttcccatcaactactagcaattcccaaggattagttcctggccctttttttttttttttttttatctttcctctctctcaccttagattgttcatcctcgcttacgacttcaacagtcatctctaaggtttgactcctaaataatctaactttggaggtgctctcttgccaaatccacaatgccattgctctgacagcctctggattcctaattcatgccccctcaaaccaaattcatcatattcctgccagaaactggcttccctactccccaccagctaccctacatttcttctctgttttgataccatcagtagcccaatacggggttaaaaccttattgttacctctaagtcgtcttcttcatccccattttcattctgttgccaagtctagcatatttttccttgcggtgattcactatatctccccacttctctttgtcctcattatttctccccatcaatccctgtctccacatttttcttcagtgacaccagccactccactccccttcaaacatgatgtagtcattcttggaagtattttctcatatctcccccatccagaatgttttttcctccccttttggcctcctgaatgagaccccatcctttaaaggccaccgcaaacctaaattccatcatgtagccacgtttttccaaccctyaggcctttgcgcacattggtcccttcatccagaatgtctcctagcctctctaagccccattcatttaagaaatatatgttgaacattccttatggagaagatactggactgtgcactgaggatttctgagtgaataagacctagcatattcttataagggtattcagctcaagattcctctcttctgagrtkttttttccctatggccccacaggctaaactatcagcttcctcatctgtgagtctcagtaccatcttacaacctgtcccttaggttttgaattcatattgcttgagtctaagaatgaatatctcccttctgacatctagctcagtgcatgatagttatttctttagatgactgtgtcttttactagaatgtgaatctcttgaaatgataccttcttactcttgtgtctttaacatgcataatggcaaacaaagtgtaagtgctcaataactatttgagcagaagaagaaataaatagatggatatatggttggatgggtggatggttaattggttggatcgatggatggataggaagatagatggattgatgaatggacagagatagatagacagacagacaagtagatggacagatgaatagatgaaaggatggacagatggacaaatggatggataggtggatcaatggatggaaaatgggacagatgaatgggcagctgcattggatagttggaaggatggacagatggatgcatggatgaatgagtagacagaaggactggataaacaggcaattctttcttggatgtctatttggatggatagacagatggatggatggatgaaaaacactcccagttataagacactgttcagatctataatgattaggaaagaaggttatagttaattgactaatcatatccaacagtgggctagcatatatctcatacatagactgccaattttctaaaaattaatagaatgcatttagaacaaaagctatactgaacaagatttatatgtggtgattctgaagatccttagaaactttagcatttccaggacctcattaagaatcacttaggggtatatagactggcgtaaaccatttgaaatgctgtaaagtgaggtttttcatttaaactaactatgtgatataaacacctatatctacatgtagaccatttctctaatgatttggatttctaaaaytgacaacatgaaagagcttctctacattaatatcttaacggtatttggcaaacatctggcaaaattataagccatttgtctatctctctcagatgtcttattgacatgtggatggctcaggcagaaatccatcacgtatattaagcaatctcagaaaacgttgaatcccaaggacatgagcgtggccataaatgttcactaagccaagttcagacagacagtcctaacattagaggtgaacccactggaagcttaataactgacagtttccatactctgtcttccctttaatctctagttatagagcaccaggctggaatgctggtctcatcttggataaaaattctttcctccctccctcattttttccttccttggtttctttctaccttccttcctccactgctgccttagcatttcacatctcaaagcttttgtgtatattaaatccttatattctatattatatatcatgtgcatttcatttattgaagggagaacccctcatgctttatttgactctgtttctttagtggctacaggactcaataaatgtttggtgaataaacaaattggtatagggctcycactatttttgttcatgttacattgtgttgcaatcatgtatatatctaaatatatatgagatcctgtgtgcaatgaacaaaaactgatgtcctcatttttcagataaggaaactgaggctcagagacattaagagactatcctgagcttacatagttagtacaataaatgacgagctaaaatgcaggcctttgaaattttatcccagggtccttccatttgtccawtgtttctttcataytatttaagacctatggggaacagtgccataatttctgtgtgttgtaacagatgtgggtgggatctttgastggtaggaatgaccaattgttttctttcttgcctcaaatgctgaatagagggaaccatgtattcaaatatcctgtagcataaaaggcatttgggcacgtgttactgttgcataaaaacactctttacacagactgtattacacagattattgctgtgyaacaaactacccccaagctcagtggcttaaaactataagcttttgttactgttcacagcaccatggatcagtcgggttgtacttctgggttcactgggctctctactgggtaggcaactctgctgatcttacctgtgctctttccgaggttcaagctggctccagattgatctagtgtggtcttggctggaacaactgggctgtcctctttatggtctcttgggacttctgcttctcttttcctaagctgagaaaaacttcatttctattttacataacattttaagaggaaatgtatgatgaaaatgtcaagcagaacttcagttcatttgctaaaaatgtattggcttttaaaagacagtagaaatgaaagatccggccattatattttatcatgatagagactgttatttaatatttgaaagcccataacttgttataaagaatatacatgacacagagcaagatacaagcttatctggaacagtctgttgctgggaaatttcttttttgccctcctgcccttcatcagattctgtttttgaaaggcagtctatgcctattccatgaaagaaatataaaggagtgtgcttgtatccctgctcaacttttttaccctgctcaacttttttaccctagatatatgggacccctatttgaagactattgattcctgaaccttagactgtcagccttttttcaaaaaagttaaaagacccactcacagtgtttcagatacacgagggcagcttgggcttcagcagaagtgaacttgagtttggcacagcgaagaatttcctgcctatgaaaattgattatggaagagatactaagccttttttytttttctagatcagargttttttaaaaacaaggtgaattgatcatacagtaagtgtgtgagtttattcctggttaaaaagcagagggccagccacagtgtctttaatttcctttttttaacattcagttttatgccataaataaaaggcttcatctcagctcttattcatattgggtagctctgtcacaaacacgaagccacagacacgtgtgcctctttggacaggatttaggcaaagtaatcattgagaatagcccattgctgccagaggaaatgtacaaagaagcaccgccgggtatgaaggaaagcatctcaggggttcatgtcatccctcaactactcactgttgagttcctacttttatacattaagccagaacattttcttttttctcatttctggaattgaacttaggatatttcttatagctcatatgtccaaagaaaaggatttttcatctaaaactaaatctcttgccttgcaaggacgcgcaccacaccgtgcttgtctgaaaatgaatgcgaccacagtagggctgcccttaccagcccagacagaggagggaaaaagtatttgaaagactgtccacacaagaagaggtaaaatctgcatatcaaaaagtaaccagtgagggaaatatgattaaatttgttttgaaagtttcattagcataacataccactttaaccacaaagaagtatttgacgtctgtatattctgatatttcagagattttctataacttctttgaataattttaagaagctgagctaagctggaagatcatattaaactctcagaatgctgtgtccagactaatttcccccaagacttcaatattctgtaaaaattctaagcatgctccttgctcaattgctggcacaatggacaccaggtcatctcttagrcttcgaggttgtaggggcctcctgtcaccttttgaagtacttgcacatatgctacatgttgcagactcagagcagtcctcttaggattccattttgacctccattttacaaaccctgaaatcaaagtccctggaaatggaataacttgattcattcaacacatactcttcggcaccctaccctcagcctggtccaaaaggcacatgtctcatgagtggcaagaaaacttagctgcagcctcattcactgaccttttttctctgtatatttgttccaatttcaactggaattcacatggcaggcactttattaggaaaaagacacagtccccaccttcaggcagattctgatgtagaagaaatgtttactcaccccaactctccccagtttacagtgggacgtgctatgttaaatgcttgaattaaatccttaggttgtgggaaaagtaagtctctaacaattagtaatagatccacctgccttcagatccatggtagctcgtttacatgatgagattagaaaatgattttttaactaaaattaaagcatgttttaatgtttttcttttaaatatatcagtgtgttagttacaggtcatccccaactcatgacaaccccatagttctaatcaccaactgtaactcattattcttgcagttagcaaggagctgaagagtcaagatgaacaaattccagactttaattttcaagcaagaataaatagaccatcatgcttcctttgctaagctgaatatagagaactttatggacaaaaataccatcaattgtattttcctttttttttttttttttgatgtgaaaggatttttagtgaagcattgttttcatctcttcctgaatccaagtgaatctacatcttttgcatgtttcctgcattaaatttttattgtgtgcctgaaaatcaatattccagatacatgcacaagtgcacacattaaaatgaacatgacttcatttatttccatgattagacattcaaataaaagtgcttgggtgtctgttttcatattcataggtcgagatccgtacatcagaggtatttgtataagtgacacttttattacattcatttcatttgcaatatgatagtggatcataaatatgttacttttatgccaccaaatctgatttgtagcacttagcccctcacaaggagaatacttgatattttatggagcacctttcatccaagaagcgctttgcaaacatcaggccgggttctatcaggtgtataaatcacatctgtgaccccctgaatgccccacctgcttcatcaaccttctggctactactgtaggggtggagagcagttagtgattcccccgcagaccccaacatgatagtgagacctttaagttctggaagaaagaggctcaggtgaactctgtattgccacatataggccctgacagtggacagaacaccacatttagttatatgtctaccttatcatttgcaaaacagttttgaggcccccatctgtgggtcggatcttgtattaagccctggggacatagagacaagtaacatgtggcccttgcctttcagatattcacagacttggaggggagggctttgatgcaggcttgacagtgtttgctcctctctttgcctctccattccctcccagaggtgcaccgtacctgaaagcagcttgtcaaactcccaggtctggcataggtatatgagtgcatataccagtcagtcgcaatcagagtgaaagaagaggtccaccatcaaacatcccaggcagccttggagctgagcatcagatgcacaccccacgctcccagagaagagagtcatctccccacccaccatcccatagcatccctcaatttaccctcccaattccccagcgttagcttcctaatctaggaccagtaggatccccctgccacacccagtaatacacaggcacagctccctgtagcatccttcattgtactcactacgctgtggactgtgtgtacatggggtagactcagacgcagcggagcacagtgggtttcctaagttctgatcctgactgtatcactcacaggatgcatggcctcaggcagggtactcaccttcctgtgcctccactttctcatctgcaaaatgggtataatagtgatatctactctattaggttgttgtaaggattgaatggcctaccatgaatagaaggctttatgatagttgtaatgaacactttcagtattgtggtaaataatactctcgtatattaattgcagtacatgtaataatagtgatgccaatattctattattattattattactgtcactgttttattgtatgatgaatgtctgtctgctaccataagtttttgctccatggtagcaacaaccatcctgttttgcgatggcacatagtagatactcaataaatattcattgaatgaatgaatgaacaaaacaatgaaggaacaaatgaatccacccactcatttggtgccactgcgatggcttctccaagcaccatttttcatatcagtctcctctgccactgacagccacaggccccacagtaatccccacaagtccttggtgtttaggtcatccatttcccccacggaagggccttacattcttcctgcataactaacccacataggcctttacagtagtctacctccttcccaccaagcccaccatctgtgtgtctccatgcaggtgctactgccatctcgggggaggctctgaaaggagctgtctcctctggagttgaccccaggtggtaagtggtggagctagcactagttccagatctcctgacttcccctgcagtacttgtatcgcccttgcctcccactgctggcctccaggggaacgagtccctgcmctgccccaggagccactgaccacgaggcctcaaagggaccaatagtcccaagaacttggacaaagctaccatccctaggcccccgtggcttcttgtgcactgtgtcacctccatgattctggtggttcttggcagcccttctcaaacactgcgtctgcgttcttctagagtttaaaaccattgagggaagcagctgctgaagccacgtgtttagaaaatttgtccgtcaacttatgaagctgtatgtaattggggcatcatcaccagaggggttgtccctgcattttgtgggtgtggaagaatttgtgataatcccaggagtcctttattcacatagacagtggtggtgggacttcacgtaggggacaaaaggagtgtggaaagtagcctgaggttacacactgctccccttcgagtgagctgcaaaggctgctccaaattgggcccaaagcacagaaaatggtgctctggcttcacagttgtgattttgcaaacggcgtgtgtgatcactgcacaacccaacagagatgcccaacttggtgcccagctgcagctcacccagggccccttcccacaggacctcacccctccctttcttgcttggttcagttacttcatggtgacagctcacagtgtctcctctctcctggtaaccctctagagctgggtttgctcgtctgagttttccaggcccctggtggtggatggggacagtgaagcagaatgcttaggagcagacacaggtcctgcagacttccctgtggatgggattatggggactccttctgtgggttgttagtttgttttgkggtttctctttctgcacattgggttgactattttcaaacatggtattgttgggcctcaagttccttgagtgtagaaatggggtcataaggcccacctcacctggcttactgtggggatttcgcgagctaggattcttcacctgctgatgcccagtggcccttgccacacaatcactaaagggtagtgaggctgctgctgtgttttaatgtagctgtaggtgtcatctcagcttcagaatcgactcaaacagttyctggtatttagcgatgtgtcacctcccacagggctctgggttttttgttggtgttgttttgtgatataattcacgtagcataacattcatcattttaaactgtaccattcagcggtgcgtagtggatccactaagttgtgcagccttcaccagtaagtccagaacattttcatctcctaaaaaacaaaaccctgaacccgttagcactcccgatcctccctccccaccaacttgcccccgtacctgacagccacgagtctactttttgtctttggattggcctgttctggacatccatataatttagaatcacacaatgtgtggccttttgcgactggcttctttaaggcgtatgtgtgaaagcttcatctgtgttgtagtatgcatccataattcattcctttctatgacaaataatattccaccataaggacgtcctagattccacttccccgtcatcgggtgatgaacatttgggttctttccacttttcaactgccgtgagtcacactgtcatgaacattcatggacaagttttgcatagacacatattttcagttctcttgggtgtacacctaggagaggaattgctgcgtcacatggtacctctgcgtataactttgagaaaaactgccgagtactcttcctcggggctctgtttcagaaggaccctccctgcttagatttgactttttcactagctaaggaaggccattggcagaggccgaggaaaagaggggggtctgatcacctgagatcctgcgcactcacacacaagccttcaggcattccctcccctcagcagcccagactccatcctcacggagagccaccatgccgcctctgccaccctgcatgacccctttccccctcattgtgtctcctttgcccgccggcttctttgcattctctctgctttgaaccatgatacccactctcacccagcgtcctgcgccggctgggagggatcgggtcacagaggtctcgaggggccagtctgcactgggaaagaatacagctgaggctgcacttcccactcatttcaccagtgatctagaaattttctgagccaatgagcagtgtcatttcagagtcctgggggaaggaaactgtctagaagggtgttctcttcagacctgttggtttccttaggaataagtaagtgagtccaagtgaggaaggaacttctcaaccacgtgaacttgagcatatttcttagcttctccaagactcagtttcttcatctgtaaaatgggtttaaacttgcctacctgataaaaggatcaagtgagataccgtgataccatgttcaagggactcaaaaaaatgttcctggtctccccagctgccctccctcctggttaggtaggagtggctcgtacagacactgactttgtagtaggactcacctcccttttttcctttcttcccccttctcaccccttgctctttcctttcaccacttcctctctcctcctgctattgtcttactctgccctcagctcctaccccaaatatgggtattctcatggtgtggacccagggaactgccagttctcaaatcacccgtgtgctcttagggaggcaactcaggccagatcctcttagggcagatcagattatgccctgggtcattttgcagtgcagattcccaggtcacagtggtggcatgcacagccaggcagcatccagcctggcacccgctgggccccagagaacatggactccctggagggggtggcatggtctgtttcgcctgtctgcctccctgggtttcagtttctttcctcgcgagatcctagscaggggctagagctttgagttacactcggatttgaagtcatcccagaggtctgtgctgcaggaggaagcacgggcttccatagcactgtgtcctgggccctgactttgtgcctggcaccgtgcttggctcggagcatgcagagggaaaggacacacacctgctgtgggtccagtgttccagacacaacgtggagtcaagtggctaccagcgaataagggaatgaatggttttccaggctgaagatttcatactgtatcaattattatttttaagtaattttatattccaaaacagataatatggttcatacagaaagtttagaaagcagaaaaacacgaagggacaaaaaccatcatccttatctcctctcagatgagtttcttcaaaagtgcctgtcacttaattcagaaaactaaaaagcaaagacaccaaaatgtgtagctaggaaatactaattatgaagtaacggggctttgttcagagacctgacccttcccttacaatgtcactcagggcatcccatttgagggtaaagctcttggaaaaatccttctctcttcaagagatccagtccacagaaaaagttcyctcacaacaagccaagactctgagcctcctgggtgagcccaagctctccaaacaactgacgggcacatgcatatacagaaagacaaacctagctctctgccggggtcccgcggctgccaaatcccttttccagggaggtgtgttattaccacctcttcccactgtttctgtcccaaatatcaartgagcttaaggcagccttgggaggtggaacctcccagctcaggagcacaggcccagccttcagcgacccctgatgtgccttctctctcgtttccagctgtcaggaatgacaggaacaagaaaaagaaggagacttcgaagcaagaatgcacagagagctatgaaatgacagctgagttggacgatctcacagagaagatccgaaaagctcaccaggaaactttcccttcactctgccagctgggtaaatacaccacggtaagagatactcctgccccaggctgctgggagtgtggaaaccttgtacgtgcatgtgtgcagacacacacacacacacacacacacacacwcacacacacactttgcactgggcctggcaggggcttgcatgctagccagctggggctatgtagtagccacttctttctgtgaggtagcctttgggcgtgggcaatcagtgagtaggctgagtgcygcctcactgcagtcatgcacacatgcattcactctagatgcattaactgagtatttgctatacgacaggctgtgttctaagccctggcaacatgaactattcagtgctgctctcagagactttgatctggtgaaggaaacaagtaaagccagtgaagcgttacatgggtcatgacggacctctgtacggagggacccagggggacggggcctgatcttttaaaaaccccaatccatctgtgaaatccaaccaagataaagaggccatcccctgggccaaggtttgccttctgtgagaggacatgtacaaaacccccaagccagggcctagaaaagtttggggtaggcatgccccatgcccagttgagtgaatgttccccctctgcttcccagcgttccactaggaatggcctttcactgagattggaaataaagagaggcaggaaaaagagaagtgagataaaaaggtaggaggtgtatgttggctggtctaggttgtgccagtggaggggtcatgaggtgctttaatttttccaagtggtttttgcatgtattatgttcactgatgtatatttctaacttgtggcatgtaatagacactcagtagatatttgatgaattaatacaactagaatgttgttctggcctctttaaaaagcttaggttgctcacctacaatgctatggtaaacatactttaaaaacaaaatccaaatattgtagcacttgctggcttggtgaatggtgttctagaaaaatgatagcatgggaggtcctgaagatcaaaagacaaaatagtgataccagaaagaaaaaaaaaaaacagtgagcggcggggctttggagcagttcttggtgagcatggggtgtagtgcgctaggatgttggtggtatctgtaacacaataatggtgaccaggagcaggcccagaggggcgcccrtggaatctggggccagcacamacctaggtggcttctcagatgaaaatgagactacacagttgggtggcaccagcttctgaagggctggcacccaccttaaacagacaagtctcctggctgagctcagagactttggctcacctggaagcagaggtagaaccttgagcagtacttttcaaaactcagcgtgcatctgaagcacctggtgaactcgttacagtgcaggttctggtgcagcaggcatggcctaggggcatttctaacaagctgccaggctgcttatgctgctggtctgcagaccagactctgaagagcaaatgagccgggctttgagaagcaacacccagggtggcactctggggtccacctcgcccattggtgtcagccaggagaaacactggcatgtctgccaggcygagggagagtctcggcttaacctcaaccagtcttcactgagtttggggaacactgtcccatcccagagcagggacacaggccaggacaagactggacactgtaagggagctttcattttcacctgggagagaaagtggaatgtgaccccatgtatccagaacagaggcctggaaccacacgaatgtacttcaagtcctactcagccaccatcagcyccatgacggtgaacaaattacctaaygtctctcagcctcagttttcccatctctaaatgggaataatgtgaaatagttgggaggatgaaatgagacaatttatgaaaagctgctgtgatrgaacccaaaaatatctacccagcagtggagtggcagaaacatcatccagacacgyaccttctactggatactaactgaccctccagagacctggcccccatgctgggtgcatctgacaatacagaaaagtaacatgatgaataaccaatacctgaaagtatgccatttatttcttttagaaatacttactaattgccaaccattcagtggcatttcaggccctgtattgagctgtgtatcaaggtgagggcgtcttgacctaagaaatgagggaactcaggctggcacagtgggaaggggcgaaaagagaagatgagagaaaacaggtgctgtgcaatggtggactgtgttgagttgagagcaagtgggaagtgagaatgggaaaagcctggcggagtcttgagtgccacttgaggagtctgtaaataatgaacagtaattgatggttgtggtcaaaaatctttattattatcattgtaatcattattacatctcatatttattgagcatttactatgtactagggaccatgctaagtactataagtatactaattcttttattccttatgmggactcygtgawttgggtttcgttgccctcatattacagatgcaaaagccaggtacagaaaggctcgataactttccccttgtctyttagtcaacaagtggtcagaggtgagacttgaacctaaacagtctgactccagggcagctcttttaaccastatactatacacagaatcccttgagagggttgccaaaaagggagaatggaagctggggccattggcggcatctagctaggaggagagagctgtgacccaggaataaatcaatcttgtagctccaagaaagtcagaggaaaagagatgagagtggggaggtcttcctgaaagaggagacttytgatccaggtcatgaggtgagcgactttatatggcaatacctagggccagtaactgctacatcagggtccccctccgcctcctccaggtggtatcttagcatagccaagtcaatccccagaccctgactcacctagtaatcaggtgaaacagctcccactctaacctggaggagggcaggacaaacacaacgtacagcatttgccgctcctggaacatgcgccctggtgtgaccgggattcctacaggatggctcacatgtgaggcattgccactcctgcgagcggtccctcaccactgatgagyagaacgtggagagataaacccccccagcttccttattcgttgggcaggatactcttaggtatcctctaaaccacrtcccagagtttcccaactagatcgagctctgactgcccacagtgatgatctccgctggccgccttccttccctgcccactctgttcttccagtgcttcctgggatctcctcccacataaactatcgtgcattccaattctagtctcagcctcggcttctggcctaagagagagaggcttccctgcaggcctccagggccctttcctatccaccccaatatgggggtgagtcacccccagtcctcaactggggcccaccctcctaaacacattgtggagacttcttgtacctcccagtcaggcagaaaaacagaaacacgattttatctctagagcgtggcccttcactactgggcatccttccggaggcctgctgcccaccgcggggtggagggcgctctgagccagtctcgcagctgaccgtgctcttcatttgtactatctctccccagatctagctgtgtttttattgtgagccacttaaaatcctttctggaagtcggtggtataaataaataacagcagccataacacattctctgcaagctcttagttcsgagttgagcatttttaaaaagagctttttttagacaggcagttgcttccacggcaggaaacttcctgtcatcttcaccagagtggcatccctgtcagatgcctttggaattagtgggcagagaggaataagaaaggcagccaactgcgcatctacagatctttgaaagagtagttcctttttcttccctaattagggtggatttgggacaaatggttgggtccccggagaccgcaggaatggctggaagaggcagaaacatatccccaccacccccacctcaggccagggcagggcactcacccacaatcttcagagctagtatccctgggaaggtttctacccaatgaccctccgccgccataaaaggagagagggtggattccctgtggaaaggtggaaagcaggagagaagctatttatagatgagctttccaaaatagaatcaggactgaaccagaggtaacatcctcgctctgrggacgtgttctccgcttccttagggtgaaccctagtgagtatcatttgggctttagggcctcataaattcaagctcaactcttatccctgctacttaggagtcatgtgactttggaaagttacatcatcatttgyacctcagctccttcatctgtataatgggagttttaaaaacatccacctcctgcctggagggttccatgagaaaaatatatggagcgccttgcacagtttccggcacagaggagtcgtgccgaatgtgcagctctcctcctctccaccccatcataaatgtcttgtcattttttcgagccacatgcccaggttctgtaaactagcgtgggtgtgacagtgggacagatttccaggtggtgtagcccccacccccagctcgtgctgtctgctccgggccgcctctgctcccggcctcccactgctctgccgtgtgcgggccgctcatcaccagstggggcctggcgggaggtaagctgtcctccgaggggcttgtgaatatgaactatgaagatttaagaagcccttaacctgctcagaaaaatgaccacaaacagaattattaaccacgaaagactttccaggagacataccatagaaaaggaaggctgttttgagcacttgtcatgggtggactcggtgcgctttttggaaactaacatttgccatcaaccagaggagcagaacctggaactcggggagctcgggctgccaggagagatgcatcaggagggatagaaggtcagtgggggccacgaaacccgagttccagtccccactgtcacctcacagctgtctgactttgagccagttgttaacttagtgagcctcagtttcttgctagtaaacacacctgtgctgccagtatcacccagcagcggtccccaaccttcttggcaccagggaccagtttcatggaagagaatttttccatagatgctgggcttggggatagtttcaggatgaaactcatgaaggacaacttagatccctcgcatgcgcactttgcagtagggttcatgttcctatgagaatgtaatgccgccgctgatctgaaggaggtggagttctggcgataacgctcgctcctggccactcacctcctgccgtgcggcccagttcctagcaggacaccgaccagtacccatccacgacccagggcttggggacccctgacctagaccattctttcatgttgcaacaaacaatgactgcatacctactgtgttagtttcctagggctgctggaacaaaataatacaaactgggtggcttgagacaacattatttgatcgcatttctggaagctagaagtccaaaatcaaggtgtgtgcatggccacgctgtctctgacagctctgggagagagccctttcttgcctcttgtagcttctggcgtggaaggcagtgcttgtagttgcatgacaccaatcctccgtcttctcatggtcatcttctccctgtgtttcttcacatcgtcttctctctatgcatgtcaacctctgtccagatttccacatttttttttataagggcaccaagtcatactggattagggcccaccctaattacctcattttaacttgattacccctataaagacactattttcaaatagcgtcacattctgacatactcgggctaggatttcaacacatctttttgaggaacacagtttaacccgtaacaaacagtaacacctagtgagtgcagaactggagtgcatggatgttacctttccatgcttgccgctctctgcaaagtctagctggagatcaaattttgtcacaagtgttgtgagtatttagaaacctctggcagcacacataagtcctgatcttttgaagaaaaatgttctgtaggcactgtgctaagtacccacattcttcctcagtgatggaataagggaaagacgttcccagcaaaagcaatagcatgaacacggcacagggtttcacagggatggggctgggtgggagggaggcagagctaagtttgaggaggtaggtcagggctagcttcctaggggctttgggtgctgggataaggtgtgtgaacattagccctagggagccaagggaagtttctagtcatgagaaaaagcagttcgaagaaggtggygcctagctgctgtgtctggctggaaggcttcggcagggacacagggcagggcttttgatctttctyagatatgccctgcagctccagaaggcattcgtggccccttccagcagctgggaccactccagaattctagcatttcttggacatcctctagggccttggactatacccaccaccccacccctgcactcgaccaaggccccagatctctgaaccccaggagtgaaggggctgcagatggatagatggtcctttccaaggtcatgtcccagctcaggaatcttagacgatggtggtccaggagcacgcctgaaacgtgacctccaggggaatcctgcggcatcactcttgctttttagccaggctgctaggaaatactcraaagattctagagaccctccctacctgccctctcccattgccctttgctcgaagccctctctagccacagrctgcaccatgcctttaagatsacgccctcctgtctacccagagctacagggtggctgccaasstgccttctccccacctgttggaggcatctggtcctaaggaaaatgctgcaggcgtgttgggggccttctcctctsttctcttctgttgggggcagacgttcccgaagccatgctstcatagtgcctagataatgtgtgtattgaccacaaagagatgttggccggcacataacattctcttcatagctgtgctggagctcttgtagccacctgatggaagcatccagagattccaataaggagggagatcacagatgcaaccacaggctttaggagtcaggaagttctaaccagaaagtagaaatatgtgaggaaccagtagggagggggtgacgtggtgcactggtgggaagcctaaacaccccaacccaactgtgtgggtgaatcccacaccctccrgttcgccygcgggatcttgcacaaatgattgcacttctgtgggccttcgcttcctcatcagccaaatggggaccataatggtgcctaccgcatgggggcgctgtgaaaagtaaagmgagtcrgtgatcgttaagcatgtagaacagtgcctggcacgaggcaagccctagaaaaaggggtggttacatgcaaaaacatacaaaatgcaggaattgaatgtgggtgacagggatggtctgcaaattgaacttgaaaggacatcagtctccaggatggtggaaggatttcaggcctaaggaagaaggaggcacttccatggatatacccaacattgccacagaattttaattctttatttctttaatgaaaatttacatttccttcttaactttgaaaaaaaagccagaacgcttgaacaaaccactgtaatacccaggagctgcctccagtgggatttaaagatgctggtgattccactttcctttatgggtcttgttctgaaagtcctgccagtccaggaaggcagcccgttgcagcagagaaccaaaccagcagaagaaagggatccatttgcgtggcaaaacttgccatttaattggatttcatagtagggttgggcttttctgctgcttaagatggccctggggggccatgggcgcgaccctccatatatgggccaccacgcggcatcctggggaggcgctgcagctcctgtagcccctgccgaagaggggacctcctctggaagccctggccagactctcagtcggcagcagatggaggagagccccttgcccttctggcttggctgttttcctcatcagcctgcctcatactcrcagcaagggtcactcctcaccaccycactttctgcttctccttctctgttggttttcctccctgcacactcagaaatgctgctgaaaatccacgcttcsctggtgctccccacagccgccttcattaccaacccaagcaggccagggctctccatttgccgcagctggaagataatatataagccatttgaagcctcatgcctatgaatccagcagccagtataataaaacaccaggttattttgtgttttattaactgcctcttcccttcagtttgcataatagtgagttagatttacatgccgttaagacggctgtgcattatttttaatagaaggtacgacaggctcctctctctcagccctggcgcgtgataaagttacctcatscaatgttgatgaagrtttcgttcacacttgctgggtcggggcaatgtctttttttccagatggatactctattgtaaaatgatttccctccataagcttgactctccgtccctctcttccgtgtcatcttcctacgaaccggataaactgcctattaaatttaattacggcccaaatggccacacatcttgatctcatgttccctcaagtgyactgtataccaccaaggtccttgaggaaggaataaaataaatctggaggatgcatgtctactctccacaaggaacgtcgtggaaggcaaagttgaccaccwtcgtttttacagtgtctgtggcacctcgtssaaactcttctttctggctttccatgcagacgttcaaagcaagagctagttttattcacttcctgtagactgattttaactgaggtggggaactaaagatatcagtttgagaaacacagtacctctcctgagctgtttacatttgtcagagaaccaaacgtcagccttttgttggatagtaaattacaaatatctcatcattttatctgtaaatatcttaakatgtattctaaatgaaagaagctcctgcaaacgaaagtaaagcatcagtgccattattaccatcctaaaataaaatgatctctaacacctaatagctcatatttctggttttctcatatatatcaccacctctttacagtttattttttgaattaaaatttagataaggtttacaccatgcaattggttgtcagttttctcagtatcttaagtcaggtttattgcagtatawtttacataatgtaatttttatcttttttaaaggtatagtttgatgagtgtgataaaagtatacagtcacataacctgactccagtcaagatgtagaatatttccattgctccagagagtttccttgtgcacctgtggtcagtcsccacctgccttcccgctcctggaaaaccactgaactgttctcaatcactatagttttgccttttccagaacgtcatataaatggaatcgttttgagtatgggcgttttatgtctgccttctttggtttagcatgcttccaaggtttatccatgttgtagcatgtattacagtttccttccttattaacgctacctagcattttcattgcaaagttgtaatcacaatttatttatccacccatcagttaatgagcatttgggttgagttgctttcaatctatagatttctctctccacttgtttttctctcttgcaatgttcttattgaagaaaccagttcattggttttgtggattttctggcattctggatgttgatagctgtacccactttgtgtagtttaccgtgtccctggatttcctgaggttatctagagtctcagtcagattcaagtttgatttctggccagaatatttcatgggtggtggtgtgtttttccatcaggacatcagcatgacaggtggcgtgtttttaagagattaacaagtactgatggtcaatgcttagagccattcattcatcagagttagaaaatggtgactcctcattcctttcttgtttgttagctggataactgcatacagagatacttcctctcctctgttacttgattatccagtggtacaggcataagattttaagtgttttaaaaggatgaatccgaccggacacagtggctcacgcctgtaatcccagcactttgggaggccgagrcgggtgaatcatgaggtcaggagatcgagaccatcctggctaacacggtgaaaccctggctctgctaaaaatacaaaaggttagctgggcatggtggcacacgcctgtaatcccagctacttgggaagctgaggcaggagaatcgtttgaacccgggaggtggaggttgcagtgagctgagatcgtgctactgcactccagcctgggtgacagagcgagactccgtctcacacacacaaaaaaaggatgaatccaggctaaaaaaaatgtagctgtcccaccaacaacctgcctgctcaaggctgacatgtcaccccctctaattggaaacacattgaatttctcccctcctatagagcttcccggaaactgtatctgatgacattttctctctctcctagaattccagtgctgaccatcgagtccgactggacctgggcctctgggacaaattcagtgaactggccaccaagtgcattattaagatcgtggagtttgctaaacgtctgcctggtttcactggcttgaccatcgcagaccaaattaccctgctgaaggccgcctgcctggacatcctggtatgtgcctttttgagctctcaatgggtctggggagggagagagggcaccgtggaggggagggaggggaccaagagacattgaagatctccagaggaggttttgagtttcgactctagcactcacctgacttagtaggtggactcacctagcctctggctccttatctgtgaaatgggctgaattcccatccctcaggctcactgaggtctgcgaggctcaaatgggctgaggttggcaaactctacaggtgaatgctggtctgtttctaagtttaccccagaccccctgattttacaagaaacaaaatcatcacatatgctctcaggacccctggcacctgtaagttactgagtaatcattgccactcttcctcaggtctgtttagcaaacaggacacataaacattcaagcttcctgtgcgaccaccacacacggggacctctctcctcctaagtgggagtgcgttcgtgtgcttaattatagtaactgtatttgctttgcagaatggtttatacccaaagctatgagagacctaataaaaaagcaatgtttttatagcacttcaaaagctgattttactttccctatgttctgatgcatccctggaggccagtcccccatcccrctttctccatgggcctccctgcgtacatacgtctaatgggagctgctcccatccaaggaaacagtcccagcctgaagcccccaccagggaaagagagggtggacttccagcctgtggaagacaaagtgtgctgacccccttaccctctttaaggctctagaagcagtagcgtgagcagggcagggagcgaaggggcatcagggatcccctttttacaggtgaggaaactgaggcccacagacgtgctatgactgaatatttgcatcctcccaaaatgtatatgttgaagccttaattcccaatgtgatggtattaggaggtggggtctttgggcgggggcgattaggtttaggtgaggttacagggtggagccccaagatggaatcagtgcccttatgaggagatgaagccascagagctccctttctctttcttgtgaggatatagcaggaaggcagctgtgacctaagatgagagccctcaccaagaacccagccatgccagctccctgacctcagacttccagcctctagacctaggagaagcaaatgttgttgtttaaggggccaggtctctgttacagtagcctgaactaagacaggagggcagggatcttcccaaggtcacagatgggggtggtgcaagatcggggtggagtggggtatacggccagagtggtactgggctacctccaggcctaacaggatgtaaaagaggatatgaagcataaacaggagcccttagggatagcagagatgagagagttgtgggccacagtgagctagaccaccagagagtaacagagacaawgtgggcgaatcaataatgatgttaacaatgagctattagaataatgaatgaaaattactgggccttttaatgctttcctgacaagaacytaaaatgtaacactcagtagaatttcccctaaacctcataacacttccaagatattagcagagactggagttaccaccacagtgtctgagtggtctgtgaggtgactcacagcaaatcaagtccacagcaagcaatgctgtgtcattctgacagccctgcatcacgcagccacccagcagggcctggagccttcccaggcctcaggctctgaccttgaccttctgcttgtttcttaatccttcttttgtctagttgccagatgatgacagtttgtgatactcagccccaacatatggagtgagaggtatgctttgagatcctccgggaaagtgtcttatttctgcayagccacacacttagtgatcagggtgcagtctccacaagatttaaatccccttcctcaatttagaaatccccttcctgcctccagcacctctcttcccacatctcagcttacactgaatcctgcagcactcttccagccccatggatccaagcattagccattagccccttggtagagtcagtagaacagaaaccaatttttgtgaccttggtgaagttatttaacttctctaagcctctgtttacctatgtacaaaatagaaatgcaaatcaacaaggcattaaataaggtaattacttaaatgggattaaatacattaacagctgtaatacctagcacgtagtaggtacttagccaatgatgttgatgacaaggccaaagctgggttaacgtgggcaatttcagccctgtggtgggaatcaggaaactttcaaccactccttcctgggccatgggggtgaggagtctgggttggggtgcaataggccagggaggaaaatgtcccgatagttaaagggcaaagacctccaatcataccagacaaagttcgaaggaatacccatttggccctaggcaagagcttgtttccaagaatttgtagcaaaggcaattaatcacaagatcctgaaagtacgcaagttcaaagagcatattttgaatgagaatattaactggcagagctgtttagaagaatcttcttatctaagtcattgatatatggatagagtgggacagagtaaccaggcggatggacagacagacagacccaggctgaggttattctcagaccctagaaaggaaacccaggctgtctcaagggtcaccagccctgattgagtaccgcctgttcagagccacgtgtctcgtgttgtgtgtggtctctcaacaagacaaggtaatgcttccaactgcacgcctgccagggctggcactttcacaggaagatgcggtcagctgcgggacacrcagcygaggctctccaggaagggttgattcagaatcatgaggtgagagccctcataatacaggcagatggggatggaaggcctcacctgtcctgcccttgctcaccttccaggggaatttcccatcctagcctttgctcggtggggaccatttagtgggcagcccacagccgggcttccttcacgaggttgggtccagaagattctgaggccacactttgagtttcatgttttcccacaggagccaagtagccaaaaatgtctctattaagayaggcagcctcttcataaccactgcagatgggttttttatgtttctttcttcactcaagagttggtagcatcctagggctgtgttcaggcaagtgagggagccccggagcaggagtgaccccttcacctggctctgcccccaygtttccttctcgttcaatctcctttatgccttttcttccactctctctcacctgcctcttctcctctgcacgtaattaggatcaagtctctctcaacttaaaataaaaatcgtaaaaacaaaccttgaggtggtcagacttcggtttctctgcctcttctctccctccacccctcttccctccctcccatccttctcttcttccttccgcaaatatctgttgatgacctactgtgtgccgcgcactattctaggctctgaggaggcagcagagggaaccaagctaaaaccccagccctcatggagccgaccttctcctggtggggggacacagacagtaagcaagcagatacgtggattagacagcgtcttacatgcaacagaggagaacagaagcagaatcagggatggagcacaacaaaggagggctggggcttgtttctgtagctcagacacaggtggcatttgaagaaacctgaatgaagaaacaatttcccagtgtttcccagaaagagccaggcccaagaaaagacactgatgggaggggtgtgtgagtcgtggggagcctagagagagtggagttcaaaggccctggggcagaggaagccccggcaggttggaggaagtgagtgtgcctggaagggagtgagccagcgggggcgagaccttagatcctggagtggggcctgtgatcgtgcacagattctccttcttggtatcctatagagtcactgggttttgagcagaggtgtaccacggtctgacttttggtttaaacgtttgctctgtcttgtcatgtagcactgcgtcaatattggttgaagtcatgattctcacatgtatttactgagcacttacctcgtggatgtgagatggcagagtggagggtccctgccctgttggactctacagtcaactccaaccccgcctggcctgcccctacttttgccacagtatttatctcctcccctcaccctccgcccccaccccactgcacgcaatcctggctccacatagatcctgctttccttcagcttgccccagctgttgaatgtgggctctgaaactagcttgcctgggttcaaaatctggctctgctgcttactagctgtgtgaccttgggaaagttacttccctctctgagcctcagttgcctcgtatttacaatgaagatggcaatagaagcttcctttcaggctctagaaagcatgaaatgaagtagcacgtagagcttggaacagtgtgtggcaccctacaggcctcagttatgttcggtattattgttaagtcgcactatgccctcaggggtcctgttattgtccacattttgcaggtgaggcagctgaggcccaaggggaaggcaaagacccatagagctccctggaagagtttccagcctctggataaaggagggcaaaattgcttttgcaaaatagaaaaccttgaacaaattttcggatgagaaaatgacttgctttgccagggtttgtttaaagactgtggtggagaattcattaagtgctgtattttttacaatgaaattaaaccatgtgggaacacagcaagggataatgattcacttgtgattctgaagacagggttttcatatcagccccgtgggcaaatgatggggaaagctggtatgccacagtgatgcgtgggtggtgcaaccaggccactcagcagaagcagcgagagggtccttccttcctggacaggggctcatgccatcttgcctctgccggggttgcccttgtaaaagagccactgcctatgtttctcaaagctggaacttcagaagcgggactgattgtatttgtcaacacaggaggaagctcagagaggggaagtgactttccccaggtcgcgcagctagtaaacagtggagccagatgttgaacccaggcaagctgccttcagagcccacattcaacaggttgggcaagctgaaggggagcagggtcagtgtggagccaggactgggtgggcaggatgggtgaaggaggtaaatactgttgtaaaactgggggcaggccaggcggggttgaagagcttgactggaaattctagccgcccatctggcccaactcacaagggcgcctctctctgctatatcacctcgtggcactgcctcgagcctcagtcaagctctttcctgactcagagcctttttacatcccattccgtctgtctaggttacccaccctcttctcctcatgttcttcctggcctattcctcatctcagctgaaatgccatctcttcagaaaagccttctccgaccagccacccgattcctccctcacactgcaggtctgtcccaagctcttaaggcatagcgtaatgacaggtgcatttcccaaaagcttctcccccagtctgttgtctcagtgagagtaggaaccatcttagggttggtcgccgtggcagggttccaggctcgaaagggggatttagtgaatatttgtgaatggatgaatgagcaaatgaattaaaagtcaaaattcaaatcccagcatatatgctgcttttggaatatcacgcctgttaaggcttcaagatttaatgtctttccctacaagacacacggcttcctgagtcctgccacccactgcccttactgcccccaaggaaaatattcccatgccagtcacagcagcaccctccttctggtgacgcaaaagtgacggcctgtgtgacttcaaaatgtgatttgtggctccttgacgccctggagactgtgcagctgtatagccatggagggccgttcccatgtgaacctgtccctccctctccccttcctggggactcagtagagacaagagcccaggctggtggggagcgagctctgggcttaaagacccacagcctgagctcaggcttcagcgttgcgcctgggcgtctgtgccatcacgaggaggccctgggtctctcctagcctcagcttacccacctgtagatgtggcacgattaccccatgaggcaccaggaattgctgtggggtagccagtgtagcggttaagagggtgggctttgcagtccaactccctggattcaaatcccagctctgccatttaggagctgagtgaacttagggaagctaactgacctctctaagcctcagtttcctcaccaattgaataagtagaatagtagctcctccccattcaggttgctggaataaagaattgagttaattagttcctggcacatagtaagtgttcctttaaataagctgtaatcatcagtcttgagtaagcctaggctgcctttatgaagtgtggtgtctgagctgctaggcaatagcacctggggctgtgctgtctagttcagcagctgcgaggcagctgtggctcatgagcaccttgaaatgtgcctggtgtgaagtgtgtattgcaaaataaacagtcttttaaagacttagtatttaaacatgtataatatctccttaatgatttttttgtattgattacatgttgaaacaaaaataatttggatatcttaagttaaaatagattattaaaataattccatctatttctcttaacattgcaaaacaatggctgctagagtactggtctgcaaaacagagacagtaacggtaacaaggaactcctgctgcttctaacatctgtattttctcctcggttaaggcaggctggctacaggtcccattggggaaaacattttgttcccatgagctcatcacaacaggcactatatgcgctgcgtgtgtctttgttattagtatcaccacttaaacattgttactagtatcactacctaaacattcccacaggcatatggggataaattgtcgaatcagatcaggatctgcccacatgttgccaaacacaatcagtgtagagtgaccaagatggttgagcaacctgagctttctcctttgcctgaaaactgggcaaccccttgatgcctccctctgaggtttacaagatagaagagagtctgatgaaggaattcagtttattcattcaataaatattcattaaccacctgctgtatggaggacattgttctagatattaaagacacaacagagagcaagacaggtaaagagcggtctcattctcagagctcatattctagaagggagataggccaggaaactcagatggtgacaactgctatgaagaaaagaaaacagggtggtggtttgcattgtgaaatactacacagcagtgaaaaagaatgaactattgctgtgtacactcatatgggtgaatcacacagagaatattgagtgaataaaagcggacacaaaagagaatattctgtatgattccattgatctgaagttcaagaacttgcaaaactaacttgtaggaatataggtcaaataatggttacttctgaggaagaggtttgattaggagaagtcaaaggagccggtaggtgctggaaatattcatatcttgatctaggtagtagttgcacagatacatggttagggagaatgccttaagctgtactcgagatttgtgtgcagctccaggcatgtgtgctatattcattatctattgcagtgtaacaaaataccacaaaacttagcagcttaaaacataagcattattatctcccrtagtcacagtgggtcaggaatctggtactgacttcattgggtggttctggctcggtatctgtcatgaaatagcaatcaagaccccggccagagctgcagtcatctaaagaattccagaggctggaagctctccgcctccacaatcgctcatcacatttgtctaggaatttagtgctggttattgatgggaggactcagtttcttcctctgtggacctgtccgtggggctggttaactgtcctcttgaaatgtcagctagcttccccagagcaagagattcaagagacagcaagcaagaaggaagtgacaatgctttttgtgacctagtttcagaagtcacacaccatcactttcaccatattctatttgttaaaagcaaatcattaagtccaggccacactcaaggggagaggaattaagctccaccccttaaagggagtaggatcaaagaatttgcacacatatttttaaaccaccacacgttatacctcagttttaaaacaatgttatttcttattccaaaaaccaaaagggtggtgggatagaaaataatgggttttaggaagcattttcactgaggctttagaggaggtgacatttaagctgaactctgagaaaagagccatgtgaagatcagggaaaagcactgaagccagagggaaaagcaagtgcaaacactttgcctcagcagtgagtcatcgaagcttcacaaagaagaccaagatggccagaagttcatgagcaaaggaaaggaggagtagttaaagttggcaaggtagggagaggccactgaggccacagaaagaagtttggattttattctgaaggtgactagaagccatttgaggagttttctcctctgatgaacattttggacaacatgctctggctgctgtggattgaccgcatagtactcgagcaggaatagaaatgaaggatcacttcagaggccctcaccgtaagagaggtgatggcagcttggtggacaagtccctggctctgcctctggggtcccacatcatcagattcttccagggttccattaacaagtgggcctcccccaggacacacactgaacacacactcccatcaaaagcaatagagagatgcacagttgtctttgctgatggcaagaagagaaggctctttttgccctgaggaggatcaactttgaccatcaactggagctttgtgttgtccaacagggccctgctttggttggtgagacagcctggcctaggctatttttacccatctcgtggggcctgcatgccggtctttccagataagatgccttcctttcaaacaaagagtgttttaatcctggagaagtacttggtggttgccactggcatttgattttagtgtgacaaaatgaaacgacttgggttctctccagagacagaaccagccggaagcagtgagaaggatgcctgtttcacatgggggccatcctgtttcaggctggggccggggcagggaagggaggctcctcagataaaagaagacattgagcagtcttccttctcaggccatgtgcgttccctctctggatgtaccagttgtacttggtttcggctttgaactttctaggaagagaggcaacagaacatagtttaaatgactcatcagaatccaaatacattctaacttttgaggaagaaaaccttttcgaatagaatagttagaaacatttgagggctgcagtttggatatggatttctaagtgagttattggcaatttgcaatgtcctaaatcctggtcttttgttcctttccgacaaatctctggattctttcattttttgcaggggacagatctcatgcattcatttcttggcggcatgttaaagctgcaaagatttatttagtacccatttgattccagactagaaacgtatcccaggatttggggcccataaatattgagcatactaactttgttgttgtggtggtggttgttgagacagggtctcactctgtcacccaggctgaagtgcagtggcgtgatcccagctcactgcaacctccccctcccagttcaagagattctccaacctcagcctgcccagcagatgggactacaggtgcgcttcaccaggcctggctaatttttgtactttttggtagggacagatttcaccgtgtgggccaggctggtctcgagttcctgactgcagatgatctatccgccttgccctcccaaagtgctaactttgactgtcacttgataactccctgcacagacagtatttcctaatgtttctccaggtagttgaaggaacatcaggctggggattggaaggcctgtattctaggctctagcaccattgcttgtgtgaccttgggcaccacactttacttcccactttcaggggaaatgtgaggctttatgcccaatgacctctgggttttcttactgctgtgacattgggaatggcttcataccccatcagttaccaagatgaagtgaaacaggtcaaccagttgggaaaccagtggaaatggctgggctagctcagaaaggcccctgggcaagtatctgggaggtgaaaataacgacccatcaaatgaagagagatcatggtagtgttttgagaactactcacattaatgatcaattgctaattcactatgccacttgatcatatagtaggaacattaagaagtttgaggacatgtcctgatttagatatctctctaccacccctcccaatataaaacgaagtttctgtttccaggccacaagctctgcacccctctacagcaggcaggccaacgtgaatagttatgcagttatgtgctgcacaaaagtgcccagtaaggcygatatcgaaatcagtactgggctaaagattatctaaccttagagaggtgtctaggtttgactattggcgtggagagaaaatgaggcagctgtggagcaatggttaaaaccatgggttctagaaaaagctgaaatcaaatcattctactagcttatgtgacctagcataagctattcagatttgtttccccagctaatagtaacaattcatgggttgataggagaaataatatactagtgtttagtatggtacctggtaggtgatcaataaaacattagctattactgtatgttagggatgaagagggcttactcattcagttttcctctcggagttttaaccaataagacactgaagtcagacttttaaaaatatatacaacagaggcgctgctgcaccctcactctataggatgtcctggtgccttcctccttatccacgctggagtcctttgtgtagggagaaggctggctcctaggtcactgccttcttggagatttagagaacccaaaagcatgtgaccattgcagtacaactgtcccatcatggttcatgtggtccagtgggtttgaggctcttgtggatccaccaccagtcagataggactgtcttccccatgggaagtgtcctggtcccaaacccccagtgtttccctgacaagatgagagatttgacagaagtttttcttttaggagacctgatgggaatatgggcaggatggagagggctttactactcctcctaggtagaggtcctgtgtcttcctcagaggccactcctctctgcacatrgctgtgtaacaggaataatgcaggcctttctgatcacatctgccctcctgtaggttgacactgaggtggacattcacaggactatacccagtcaaattgaatgccattatctgggaaaaactttcaacttcttcaacctcctgagttattcacttttgtccaggtgggatttacttctctctgtgcttcaagcagctctgaaactttttcagagagaaaagtcaagtatggaaacctggtcagcagagaccctttattgtcggtgcagaaatgtggttctgggtggggaagtgctctgcaatgcacggagctccttaccagcatttasgcttaatagggcagtggaaacatgaaccaggattgagtatctacagaagcaaggcatttttagtttgttttgctctgagtgaggcctagaggcacagggcagtgagcaagagtctccttagtagctagcgccccagggggccaacagggttatgtgtcaagcatacactgggtgggactgggagactctggcagagtgactcaggctttttgcctgtagaaatcctgcctacactttagggttcggttgaaatgctacctctttatggatctgcccttgatttcctcctggctatttctgagctttcctttttctgaactccctagtaccttgctggtttcactcatgtcccttgtattacagctgcctgtgtaaccgtgtgatcagaggcatcatgggagagagagcctaacttgggtttgagtcagattcagttacatgttaactatgtgacattgggcacatcacctaacctttctgagccttaagtccttcatttgtaaaataagaataatattcactttaccaagctgtttgaaagattgaatgtagggtatgtacaaaacttgatatatactatgcatttaataaattgtcatttattgcagactgtaagctcttaaaaaatagaatcttattcatctttttttttttttatctccagcacctggcacagtgcctgggacataattaggcactcagtaaatgtttatttgagtcaagtaatgaattacttttaaaaagatatttctcaaaatttcttatgtcctgtttagtgtttcctaaaaaactttagcccctgggttttgacttctgtagtctcttaatgaaagagctaaagaagacattcaacatgtgaaagggggacagactgccccaagagctccttggaaatcttcatgttatttcctgcttacatctgattgatgatttcaggacaggatggcttagaacatccatcaatttttttttccttccagattcttagaatttgcaccaggtataccccagaacaagacaccatgactttctcagacggccttaccctaaatcgaactcagatgcacaatgctggatttggtcctctgactgaccttgtgttcacctttgccaaccagctcctgcctttggaaatggatgacacagaaacaggccttctcagtgccatctgcttaatctgtggaggtaccaactatgtagaaaagcctcatgaaattccatgaagaacagtttatacttgtaatttgtgaaaaattcctcatttcccttttggagttgttttacatgggaaaacatgtgaataaagccaggcatacatgcctggtttcattgtatttttccatgttgttacaaattaactaatggtatttgggatccttctgctcagaaagaaatcccaaaaagctattactccaattgccacagattttttttcttaaaggcaggatcacactattataaaatgaattgtctggggacatttgaatgatgacaagggacttgtatgtgctgtttgttatctagtgggtaggcatacaagtatttggctgggccctcccaccaacccttgcaggactgggataaaatttagctttcttctttgtagtgacccctactggcctataggaggctgaatcgtaagtggttaaaaagtaatggttttaattaaggagcagatttattttatgctaaaataaccatcctgctcaagatttgttttaattcagttyggtagtgacaccttctggtcaaaggaggtaattctttccctgggacaaaagcaaccaggcatcaaaatgtttatactaccaagggggggcagtttttttttgtttttcaagtatcactgcttaaagcaactgcataagtctgcaaatttgtgtatgtaattgaattaccmaattaatgaactcataacagtaggaataaggaaacaaggaagaggggaaaagggcataaatcctgattttgtttaatactttattcctggtatccagaccgccaggaccttgaggaaccgacaaaagtagataagctacaagaaccattgctggaagcactaaaaatttatatcagaaaaagacgacccagcaagcctcacatgtttccaaagatcttaatgaaaatcacagatctccgtagcatcagtgctaaaggtatgtcttcgtgctctcagtactgtagtcacacagtggacttgagggccttaccaggttgtgttgctttattcaattcaggatgtttaatggctgcttttaaagtcttggaactcatttctcattgaaatcaaaaggaaatactatccctcccccctctaaaaaaaaaaaaaaaacacctcaaatcttaccctattcaattatcttaacgattgagagctttaaaattcatgactgattagaaaaacattgttttcaagagaatgtactaaaacaggctaattctctaggttcatacatttaattccagctttctacacatctctggtttatgttaccttgactccagtttttcttgaatatctaaacctttgttaagtttctctcaatcactttagccattgctcttttgtatataggcagattttcttctgcacacttctaagcaaaggaattcttgcctaagaggtatattctttgcctagtgattttctgtttatgtagcaactcaagcaattaatagaggtgcctagatccatatcacagttgagtgtttaacagtaaggtttttctatgtagagagacaactcagcagctatccctggtaccaaatgggctattgtcattctcctttccccatcagactacttactctgtctctgaagatgtttgctagccaaggaataaactctgtatttcagaaagtgcttaaaagcacagggaacttgtttgacaagcagtcttaactcgagctccttctaagaggtctcctagatgagcattctgaattcatccttgcatggaattaagagtagaagtaaacagcagataccagtgtggttgtgaatacggtatctttgatttttaaaaatgaggctgtttaacataatactatcattctgtatagatgactagactagtgatatctaatagaatttactgcaattacagaaataatctgtactgtccagttcagtagccaccagacacaagaggttctcgagcacttgaagtgtggcttatgcaactgaggcactgtttttctcattttatttaacaaatttaaatttagctacctagtgggtattgtactggacagagtgctgctaaatctagttgtcaatagtcactgcacatcgtgaactcctctgtttgtgggtaactgccatcaacctgtctttttcaagatacacttctttcatcaggaacttctctttgtaaattgttatttcctgaaactaagacatcatatttaaacgtcaccatatctcagctgcttttccacaaagtaaaaatgttttaatggtgtaaaataaggatagcctctgggaggcattgtttgcataattttctgttatcaaaaggagcaattgtatcagttattgcttgcataaaagacgaatgaagttctagcagatcataaaaagaccctctctatcaacatactatgagtctgagctggttgagaacccaatctaactaactttgcaataaactaacacatgatttttggtggrtgcagttcccattccaaatacatttatctttctttgtatttatgagtgtgatagtaatcgatagatctttttcaacaaaaagccacctgatatctacatttcataattcctaagcaagaatcttaggaaacacctctgttaaaatatatgaaaattggtccctggttatctgtcatagcttaactccttatcttaaccatatttccattatctcttttgaaaaggtgcrgagcgtgtaattaccttgaaaatggaaattcctggatcaatgccacctctcattcaagaaatgctggagaattctgaaggacatgaacccttgaccccaagttcaagtgggaacacagcagagcacagtcctagcatctcacccagctcagtggaaaacagtggggtcagtcagtcaccactcgtgcaataagacattttctagctacttcaaacattccccagtaccttcagttccaggatttaaaatgcaagaaaaaacatttttactgctgcttagtttttggactgaaaagatattaaaactcaagaaggaccaagaagttttcatatgtatcaatatatatactcctcactgtgtaacttacctagaaatacaaacttttccaattttaaaaaatcagccatttcatgcaaccagaaactagttaaaagcttctattttcctctttgaacactcaagattgcatggcaaagacccagtcaaaatgatttacccctggttaagtttctgaagactttgtacatacagaagtatggctctgttctttctatactgtatgtttggtgctttccttttgtcttgcatactcaaaataaccatgacaccaaggttatgaaatagactactgtacacgtctacctaggttcaaaaagataactgtcttgctttcatggaatagtcaagacatcaaggtaaggaaacaggactattgacaggactattgtacagtatgacaagataaggctgaagatattctactttagttagtatggaagcttgtctttgctctttctgatgctctcaaactgcatcttttatttcatgttgcccagtaaaagtatacaaattccctgcactagcagaagagaattctgtatcagtgtaactgccagttcagttaatcaaatgtcatttgttcaattgttaatgtcactttaaattaaaagtggtttattacttgtttaatgacataactacacagttagttaaaaaaaatttttttacagtaatgatagcctccaaggcagaaacacttttcagtgttaagtttttgtttacttgttcacaagccattagggaaatttcatgggataattagcaggctggtctaccacctggaccatgtaactctagtgtccttcctgattcatgcctgatattgggatttttttttccagccttcttgatgccaaggggctaattaatattaacaactcccaaagaaacaggcatagaatctgcctcctttgaccttgttcaatcactatgaagcagagtgaaagctgtggtagagtggttaacagatacaagtgtcagtttcttagttctcatttaagcactagtggaattttttttttttgatatattagcaagtctgtgatgtactttcactggctctgtttgtacattgagattgtttgtttaacaatgctttctatgttcatatactgtttacctttttccatggagtctcckggcaaagaataaaatatatttattttaaaggtgtgtgggagcttttactacacctttatcttcagtaaagagacagagaacacagttccatttttaatgtttaaatttcatttcaaaaagcaggtctgtagtttgtaaccatgacaattaaaatctgtgctaatgcacggcagtctataacaattctacaagccaatcagacagtacgtgacatttcaatgagtaaaaaagagcataaaactgtatgtgtaagaacaaaatgttaaaaggcctaccacaataataaaaaaccgtcaattacatcatcacattaaaataagccagatgtacaaaagtctgagacagagaagacaaaaggacaacacaagatatttgttgaaaaatgtttgtgctctttgggcacttaattaaacattgcaaaatcaacatcatcttcttcttcatcagactctgcaaaatattttacttctttcctagcccgaccggttcgtggcagagaaggtggctcagtagggaagtctgaggggaagatgtccacatctgaatcctgatcaaaagatgtcttcttcggtttctagattttttttcaatagatttaaaagttatgaaaggaagtaaagactagtattaagaactatcactccttaaacttcgcttatgtttaggaagtattacaaataatggtgcttttaaaattagaatcataatgctaacctaagtgtaagaccagttatcttattttttggaggaaaaagattacatacagtaattcaccaccttggtggtttcatatttaccaagttctagcctgaaaaatgtaacacctttatttctgaaattatatattacccaaaaagtatgcacaatgcccagattagtaaaaattcaagctgtcctactggtaagtacatatcaagaattcatgggaggaaacaagactcctgcaccgtgtgtagtatgtgtgcactgtaagtgtttaaaaaaatgcaaagcatcaccgaggtggacctgagacatagaagatgactgaatggaagaggtcaatgtggaaatcaacataaaaagggatgcgggggagctgatgtcattcatttacctaaaagaaatagtgtacttctggaaaagggtcagactaattggaaaaatcagccacagtcaaatgaattcaattaaaaaaaaaatcaaattagccctggtcaaataaatccaagttaaaaggaaacagtctttagtctgaaaaataatattttagtctgaaagagtctaatatttaggtagcataacactactacagttcagtggatgaaatggaaggttctaagtaggttaatttatagcacagttatttaggaaatagtcctgattatataaatttatacttgaataatttcttaaccaaatacaagccccatattgatacgagatgctaggtggaaagctgttccaggactatagtcataagcaaactaagtcacttacagatctttttttaaaaagccatgcactaatatgcaatgatgttcccggttaccttgcttgttgttttggatgttttcctgccagggttataatcgccttcattttcagagccagatgctttccttttctttgcccctcggcctttaccttaaaatgatacaaaaggttttttcttccgtggttaagtgcaatataaaaagataaatgccacaacattgtagtttatttctttggcatgcccaatcagtggagcattgcagtcctgatctcttactatgagtgattataaacaatttggcagtagcatttcaattctggggttgacatgaccaaagactttttgacaaatacatttaaactagtgggaaagtcccaaagacaaattttaatgatgaatcccttcatacataaaacatttgtatttgctatttggtccttgagcctgaaaaggaaatatcttggaagagtacttcttaaattacatgggatttaaatattttttttcatttctaatttgtcatgggccaatacttttaaaaataccatagaacacaaattactaaaaaatgtaatcacatgctgttttagtaacacattattataaaggtctaaatgtttactccgttttacttatcaaagactagtaacaaccaattgcatatcccacattaagtggcaccatatgagaaccaccagtattaactataaaatgtcaaatacatattccttctcagacctagactcagcacatgcagcattttttttcacctacctaacctcttattctcatcattggaggtggaaggagaaaaggtaatatttaagtaggggccagatgttctccatcccacaatgatgccaatgaaataaaacaactaaatagcaattttatatctttaaaatcccttgacagctagactggacaagtacgaagatagacttaaataatcttgggatgtcatatttgatcaaatgaatcagggaaatagcatttttgaatttataaaggctttcaatcctgcatatcttgagtactactttcccagtcactgtgattcttttccaccctattatccccatttccctgtaggtctacagctccttatcccaaccactccttaaagaaatataagaaacacactgaggaagatatccttcagttgaataaaaggtagagcagctaccctcacagcatgagctaccctcatatcatgtcttacaaacatattttacaaaacatcttcaagggctttccagattctggagttaaagaggggatgccatggagaactggtgctgttccttgtgtggccctgaatacagttatttcttaggtgagaaaaaaagttctagcctaagagtcctggatctagcccattactataagtgtcacagttagtgtggagtactgatctgactttttaataacaactttcagtgagttggctgcaggggagaatttggaccattcttagggattcttatttaacctctttgagcctcaattttttaatttgtaaaacaaagtgactgaactaaattgctatgcctcctttggactatattcagcactgattcctagacacactgcttactgaggagtaaagcaatttaaaacaaaatagatacctagcctctctaaattcaatgaggtagaaaaaattcaatcttttccacacagcatatgtttaaagggttataagaagataatcctcaccttttggtgttgtagtcttctttggaatgccaaattctgaatccgagtcagagtttacagcctctactactttcttctgttttggggctctcttgggcttagggactgtatctgaagacggttttcctagtaagcaaatttccatttcacaggtcaatatacttaccaacaaaccaaactgaagagagtcctatataaatggaatttcttatagctgattagaaactgagttgcctggctgggcgtggtggctcacacctgtaatgccagcactctgggaggccaaggcggggtggatcacctgaggtcagcagttcaagaccagcctggccaatacggtaaaaccccatctctactaaaaataaaaaaattagccaggtgtggtggcagatgcctgtaatcccagctacttgggaggctgaggcaggacaatcgcttgaacccgggaggtcgcagtgagctgagattgcgccactgcactccagttgagcaacaagagcaaaactctatcttcaaaaaaaaaaattgagtcgccttaaataatgaaatggtttctctctgcttggcggcaatgtaaaggcaaacaatttctcatagatgacaaaatgctttttatttaattatgtataatttgcccttaggtaatacaattaagacattttaaggaagagccattaaaataaattaagcagtaacttttaaatacagaatagtcatgacaaaagagtagcatatttgataaattaattataacccagatataaccacagattaagtcctaacttttagaatgttttagagaaaaaaatgtatgggatcctcgaatacaatgaatagaaaccaactcacttccattcaaaagctgaaatccagacttggcatttttatgtggaaagaaatataaaatcctagataagtagacaattgataccaggcctttgctttctggaattttgaaaaatagaccttgttttacagctttatctgcagttctatgtgaaaactgataaataaggccagttgcagtggcttacacctgtaatcccagaactttgggaggccaaggcaggcggatcactggaggtcaggagttcgagaccagcctgcccaacatggtgaaaccccatctctactaaaaatacaaaaaattagcccagtgaggtggcgtgtgcctgtagtcgcagctacttgggaggatgaggcagaggaatcgcttgaacccaggcaagggaggttgccgtgagccaagatcacgctactccactctagccttggtgacagagcaagactctgtctcaaaaaaaaaaaaagaaaaagaaaaaaaaaaaactgataaatcactttttgtaattaagaaaacctaatttggaagaaaatatattaactgtagactttgtttaaaaaaaaaaaaaaacctacactgattctatggaaaatgtattccagtcgcaatttgagacactacaaataaggcccctcgttagccaagagcaggaggagccctaggaaagtggcacccagattgtgtggcttttcccacctgagtcttcatgactatatctaccacaagaaccacagggcagctcctagcagggagtataaacttagccaggtgttctaggaaccactttttttccttggcttggagttacatggcactttcaattctaccaggcaaacaggtcagatatctgagtactatagctgcctttctgctgtaaactattggaactacagaatttaacttgtgtaacatacgcaatttggagttaacatagacaatcccacagagggatatgatgcatcctcttcttgaaatgatattttattggaattatatttcgtaagggaggctaaaggaaagctgaggacttgctggggtccctgaaatcacaccacacaggcagtctacctattcaacttagacaaggccagttcagctactgaagaaggaagcaagtaggataggtaccatgataatctagctttttggtcatgctaaactcattaggttaaatatgggtgaacagtttgatgaaggaaacggggtatgtttcaggaagtaatacggctcccaagttttcagggtgtttataagatgctcatatgaagattattttttaaaggtgctttttgattgttctgttgttgttatttgagatggagtctcactctaccgtccaggctggagtgcagtggtgccatctcagctcactgcaacctctgcctcccaagttcaagcgattcttgtgcctcagcttcctgagtagctgggactacaggcatgcatacgccaccacaccaggctaatttttgtatttttagtagagatggggttttgccatgttggccaggctggtcttaaactcttgacctcaagcaatctgcctgcctcgacctcccagagttctgggattacaggtgtgagccactgcgcccagcctgattgtttttttaaaaaagagaaattatagggtccatctcaatgtgggttccccagatttgggccaatctgcctaatcctagagtatggattcaagtataagtatttatttgagagataaaggagggggagacaaaaatgagacaatgaagagaaggcagccagtaataggtaagttaccaagccaatcatcactctaggagcttaattccataagaaatttttgagtcccagtgtgaaacacacatcccacagttggctcacatgagaggcaaggacactgagatatttatagaccaactttcctcaatctgctagttaaaggcagctgggagcaggggggtgttaatattccagcacagtggcaaagaggaagtcctcaggcaac

SEQ ID NO: 95312 - DNA, 114137 bp, Homo sapiens
tggcatgaacccgggaggcggagcttgcagtgagctgagattgtgccaccacactccagcctgggcgacagagcgagactccgtctcaaaaaaaatagaaataaaaataaaaaataaaaaaaataaaaaagagaacttcccccacctctctaaggtgtccaagccccgaggaggccacctcccaggaaccaggtcaggcatccagatagaactgacttataagttcttgaccagatgtggtggctcacacctttaatcccagcactttgggaggccgaggagggcggatcacttgaggtcaggagttcagcaccagcctggccaacatggcaaaaccccatctctactaaaaatacaaaaattagccaggcgtggtggctcacacctgtaatcccagctactcaggaggatgaggcacaagaattgcttgaacctgggaggcagaggttgtagtgatcatctgaggtcggaagttcaagaccagcctgaccaacaaggagaaaccccatctctactaaaaatacaaaattagccttgggaggccaaggtgggcaggtcacaaggtcaggagatcgacaccatcctggctaacacggtgaaaccctgtctctactaaaaatacagaaaattagccaggcgtggtggcaggcacctgtagtcccagctactccggaggctgaggcaggagaatggcgtgaacccaggaagcagagcttgcagtgaaccaagattgcgtcactgcactccagcctgggcgacagagccagactctgtctcaaaaaaaaaaaaaaaaaattagccgggcgaggtgcctttaattctagctaccctggaggctgaggcaggagaatcgcttgaacccgggaggcagaggttgcagtgagccgagatcgcgccattgtgttctagcctgggcaacaagagcaaaactccattcccccgccagcccaaaggaaaaaaaaaaaaaaaaagaactggtttataggttcttgggggcaggcactgcacacactcatttgggcagtattttcagctgtgggaatgggtgcctcttaatcacctgcccactggcatcaggtgccctgaaaatcaaaggcaggtatacgtgaggaggccagtcagataggggcaatgcaggctaatggagggtttgagctggcagcctctgtgaggactaaatgtagatcccagcagaaccctatcagtaacctaatatgcacatgcctatgcccaaagaccttcagtctcccagtcaggtcatccaaagcctccgctcaactaggccaacctcagagaggggagggacacaggatagaaaaccccttcccaaccatctcaatcctagtgtttagcaacatgtgtgccagaccttgggctaaccgatgacagatatacggggcagatacagtaccgcagtaatgccatcctttctctctctctctcttttttttttaattattatttttttagatggagtctctctctgtcacccaggctagagtgcagtggcgtgatctcggctcaccgcaagctccaccttccgggttcaagcagttctcctgactcagcctcccgagtagctggaattacaggcactcgccaccacaccgggctaatttttgtgtttttagtagagacggggttggtcacgaactcctgacctcaggtgatccacctgcctcagcctcccaaagtgctgggattacaggcgtgagccaccgcacccaacccgtcatcctttctctcttaggactcacagtctaatggggggagacaagtaaaccatggggaaaaggcatgagacgtgctgtaacggggttaagtgaactaggagtaggcaatgtagtgcagtggttggaagcctagactggcatcagatgatgctacaagagtgcttagtgccatgcatgwcctgtagggagtgatcaataaatatttacctgatgctatttacccaagatgctattgaagaagcaaagcttattttacaagccttctgcaatttccccaacaaatgtgaactatccctattaaatgtctgtagttatcttccatagaccccttgaacctagatgggcaccctgccctctcacagatagcctgggtccatcacctgaacggaagacaatggagaggggagcacaggggaaatggctgggatgacaataggagaaagaaagactgggggaggagctggcacctccaaaggaggtagctcaggcccctagggtgccagggaataccaagggggcccatctggtggaaaggggtccctggaggacttgtcttggaggtacatttgcataagaataagaaagcatctggctgggcacggtggctcacacctgtaatcccagcactttgggaggccgaggcgggcggatcatttgaggtcaggagttcgagaccagcctggccaacatagtgaaaccctgtctctactaaaaatacaaaagttaggctgggcacagtggctcacgcctgtaatcccagcactttggaaggccaaggcgagtggatcacctgaggtcaggagcttgagactagccttgtcaacatggcaaaaccccatatctactaaaacagtacaaaaaattagctgggcgtggtggcacacacctgtagtcctagctgctcagaaggctgaggcaggagaattgcttgaacctgggaggcagaggttgcagtgagctgagatcgcgccattacactccagtctgtgcaacaagagtgaaattctatttaaaaaaaaaaaaaaaaaaaaaggccaggtgtggtggcttatgcttgtaatcccagcactttgggaggctgagggaggtggctcacctgaggtcaggagttcgagaccagcctggccaacatggtgaaaccccatctgtaccaaaaatgcaaaaaattgtaatctcagctacttgggaggctgaggagggagaatcgcttgaaaccaggaggcggaggttgcagggagccgagatcacgccgctgcactccagcctgggcaacaagagtgagactccatctcaaaaaaaaaaaaaaaaaaaaaaaagaacagggaagttgaacacactgacatattggttctttgaagacgaactcattgtacttaacaattttccacctcttgaattttaaaggaggttaacaggctaaaacctttgaagaggaatttattgtatcctacatcaccaaagcctgagggagaaggtgtcatgtttagtcctaatttattgttaaggaaactgaagcacaaagaagacgagtgacttggccaaggccatgcagctagcaagtggaggagccagagctttttgttccaccctcagccccgctggttgggttgcctaggtcgaccagacctggccaccctggggagaaattgacaaaagagggttaaagcttcagtctaggccatttcccaaccttctcgaagagccacattctggccagggccagcagctgaccctgggatgaggaaggcgtggacggagccctttctcagcactagtaacctttgatctctaggtggggtggctagcagcggcacctgaaaggatggcagggtggctggactgggagggactggggatctaatccctttgtgacctcaggggtgtcttcagtaattggagggacaatgactgatggtggggggtattgaaaatcccagttgtgtggcgggagggcagagatgaggtgagggaggggcctggagaaaactattgatacagaaggacggggggccaaagtgccaacgggaggaagagaatgggaagatggggagcactggttttggagccccagcacgggcattttgtggtgctatcattttgagcaattgagaaccttcagctttcttttccttgtctgtaacagtatcttcctcccagaatagttgtgaggagtttggtacctaataaacactcagtaaatgcaagctattattattacaaagtacttaagatgtggccctgagtgtggtgagcgctgagtcccaggaggccattgttatgcattgcttggctgcctgtggaggcccagcctagacccccagctcaggctggagtgatcaaacgaggcctgaagatcctgaatgtgaaagccccttaggaggctccagggatcctgggagcctagccaggaaggcctttctgattattattaggccctagacaggggcccacttccaagcttggccaaatcattccttctctagaaaggctcagtggccccctgggcctttggcaggagacgtgtgaaaatccccagtggaatagggaaagccacacactaaagctgggccaggtgggcctttcgtccaccccacccccaaccccatcccacccctgccgcctgttgcccctctccccaacccccactgtcagcaggtagtatctgagtctccagcgataggttcagggcaaataaagaatggaagatgccccaagagtaccctccttgtgctgccctcccctccccagagagtttgacagaccattcctggaaccagggagaacagagaaaaagctataggaggaccttaaaaatgacctcccctcactacagaactcaagtgaatgacctgaaatggcagtaggagggattgcaattagactgccagagggaatttactgactgacagcaatgttaagtgagctagttgcagagaagttataaaaccttttgttaaagaagaataatagttacctagttaggtgcctagtgctcttcatacatttgctcatcagtgcctacaacaatcccattgggtaagtgccattattatttccattttacagataaaagcactcggctcagagatggggaagccacttgcccaatattactcagcaaaataagtggcagtgctggggcctccacccagtaggcaaccctgcctcttaaacacacatcttcagagagggggtgggtgggtccgatttagagcctcccacaatacctctcaatgattcttgtttttaattagcagaatctctggccatccctataaagctgtgacctaggaatacaggcaaatgaggatcctggttgtcactgctaccattggctgagggcttccaatgagttaccaaaagggcccaaagaccactcagagcaaaagctcctagtgtcctccctccaggatcagaagacctcttcaaaaaggaagccaaaatgcatgagactatcactcacagggggtaggagaaaagcaggcaggaactgcacaagctttgaaattcattcttgaccttctaattctcatgcttaggattaccaggagtctacatccccatttttacaaatgaagaaaccaaagttcagaaagatacaggcatgcaagtctctgaacaagaaatacaagtggccaataaacctatgaaaattatgcctggggccaggtgtggttggcttacgcctataatcccagcagtttggcaggccgaggtgggcagatcgtctgaggtcaggaattcaagaccagcctggccaacatggtgaaaccccatctgtactaaaaatacaaaaaaagcatccagatgtggtagcatgcgccagtagtcccagatccccgggaggctgaggcagaagaattgcttgaacccagaggggaggttgcagtgagcttgagggaagagagagacactctcatattgttttatattgttttatactcagtacctgttttaagaaaaaacaataaggaagtaaaaccaaagacaggcagcccagcgccaggccgaaaccaggcctgggcctgcctggcctaaacccagtagttaaaaatcaactcataacttagaaactgatgttattcatagattccagccattgtatagaagaacattgtgaaattccctgccctgttctgcttctctctgaccaccggtgcatgcagcccctgtcacgtaccgcctgcctgctcaaatcaatcacgaccctttcatgtgaaatctttagtgttgtgagcccttaaaagggacagaaattgtgcacttagggagctgggattttaaggcagtagcttgccgatgaccccagctgaataaagcccttccttctacaacttggtgtctgagaggttttatctatggctcgtcctgctacatttcttggttccctgaccgggaagcaaggtgactgacagacggccgaggcagccccttaggcggcttaagcctgccctgtggagcatccctgtgggggactccggccagcctgagtgacgcgatccaaagagcgctcccgggtaggaaattgccctggtggaatgcctcgccagagcagcgtgtagcaggcccccgcggaggattaacacagtggctgaacaccgggaaggaactggcacttgggagtccggacatctgaaacttggtaagactagtctttggaacttgccccactccatctgagtggaagcgtggcctgatcacccacggtgtgcctgcattggcacttttgttctggttttgacttggcttgacttggtaagactagtctttggaacttgccccactccatctgagtggaagtgtggcctgatcacccacggtgtgcctgcattggcacttttgttctggttttgacttgacttgaattgctggatactttagttttggttttcacttggcttaaattttttggtattcagattttgaatttcatgattttggtttggtataaacggtaaaagtgtgtgtgtaccctctttacccattctttgtcttgtggtgagtatgtgtggtgtgagcatggtattttgtctcggaagaaaaaaatatgggtcaggcgcaaagtaagcccaccccactgggaactatgttaaaaaaaaatttcaagatttaagggagattacggtgttactatgacaccagaaaaacttagaactttgtgtgaaatagactggctarcattagaggtgggttggctatcagaagaaagcctggagaggtcccttgtttcaaaggtatggcacaaggtaacctgtaagccaaagcacccggaccagtttctatacatagacagttacagctggttttagacccccttccccctctccccacagtagttaagagaacagcagcataagcagctggcagaggcaaggaaagaccagcagagagaaaaaaaggccatctataccaattttaagttaatttagactgaacaaggtcttattaatagcaaaggataattgaaatcacaaacttataaggttttcaacaaaagtgaagtttgctaaaagttaacagtgtaacatgtattatggtaacttctaatcttgtggccttagacagtctagtcaaaacacataaagaaagtttgctttaaaaaaacaatggttatcttcaaaaataaaggggagaggcagaatttatataaaaagagttatatgataaattcttgtcctgaaataaattaactggttgtttaaagaaaagaatgtttgtaataagtcaaaaagttaaaacatgtttaaaaaattgtctgcaaaagtcataaaagaaaaaattttattaaaaaaattttaagcaaaaaatgttgtataatttaaaagtaataaggcctcctgtgtactattaagacagatgcaaattcctggttgaaatggatcaaatattccatctgcacattaaacaaaagcaattgttatgcttgtgcacatggcaggccagaggccctgattgtcccccttccactaaggtggtcctctagtcgaccaggcgtggrctgcatggtagctcttttccaggattctacagcctggagtaataagtcatgccaagctctctctgctatatcccaaagtctctgcgggtcagcccccragggccatscagcttctrtctcccaacactaagttcacttcgtgtctctcacggcagagaggaaacttagyattccttggagacctgaagggatgcagtgagcttaagaattttcaagagcttatcaatcagtcagcccttgttcatccccgagtggatgtgtggtggtattgtggtggacctttactgggcactctgccaaataactagwgtggcacttgtgctttagtccatttggctatccctttcaccctggcatttcatcaaccaaaaaaaaaaagaaaaaagaaaaactcatgtcggccccagccctgaggctacctgacctgacaaaactctttacactctgtgtcagaaagagaaaaaatggcagttggagttttaacccagaatgtagggccctgaccaaggccagtggcctatctctcaaaacaactagacggggtttccaaaggctggcccccatgtccaagggtcctggcagcaagggccctgttagcacaagaagcaaataagctaactcttagacaaaacctaaacataaagtccccccatgctatggtgattttaataaataacaaaggaaaccattagctaatgaatgctagactaactagataccaaagcttgctctgtgaaaatccccgcataaccactgaagtttgcaacaccctaaaccctgccaccttgctccccgtatcagagagcccagttaaacataactgtgtagaagtactggactcagtttattctagtaggcccaaccactgagaccacgcttaaacatcagtagactaggagctgtacgtggataggagaagcttcgccaacccctgcaaagtgactctgaagaagatgacaagccctgctccagtcacacccggaagctgacttgtacacacatggccgaagcatgaggaaactcattgcgggactcattttcctcaaaatttggacttgtacaataaggacttcaactgaccttcctcagactgaaaactgttcccagtatatacatcaggtcactgaggtaggacaaaagattgctacagtcatattattttatagttattatgaatgcctaagaactccaaaaggaacctgtttgtataataacactcagtataaagtaggtaatccaggcagtgaccagcccaatgtgtgctatgacccctctgaacctcccaagatcacagtctttgaagtaagactaaggactggtccttttctaggtgacacaagtaaagtaatagctagaacagaagaaaaaggggtccccaaaaatgtaatcttaaaatttgaygcctgtgcygctattaatagtaaacagcatgggataagatgcrgttctctagattggaaaaaaagttacacagcagaaaataagtacatctgtcaaaaatcatatttatgcgagatgtgtcaatactggtcttgtgtcatttgagctacttaaaaagaaaataaaaaawgatcctgtttggctccaaaaatgaaaagtcagcccctcctgcacaagtgggagctgcatccttttaaaattgataatcacaaacccctcagacccaagtaaaataaaaaaaaatgtaacattaggcattgatggaaaagggctggatcttagtgtaagcatcctaataaaaggagaggttcaaaaacgctctccagaaccagtatttcagaccttctaccagtattttctaccagtatttcagtatttcatgatgaactaaatgtgccagtacctgagattccaggaaaaactaaaaatttgttttttccattagccgaacatgtagcccagtctctacaagtcacctcatgttatgtctgtggaggaactgtaacaagagatcaatggccatgggaagcccgaaaattagttcctacagacccagttcctgatgaattcccagcccaaaagaaccaccctgacaatttttgggttctaaaagtctcaattattggacagtattgcatagctagagaaggaaaaggattcactcatcctgtaaggtggcttagttgtcttaggcaaaagctgtataatggtaccacaaaaacagttacatggtagagttccaatcacacagaaaggaatccattcagcaaatttccaaagttgcagactgtttgggcccacccagaattccaccaggactggacggcccccaccaggttatactggatatgtggacacagagcttatgctaagctgcctgatcaggacaggtagctgtataattggcaccattaagccatctttcttcttactgcccataaaaacaggtgaacttctaggcttcccagtctatgcttcctgcaaaaaatgaagcatagccataagtgattagaaaaataatgaatggccctctgaaagaatcatacaatactatagacccgccacttaggcacaagaaggctcatgaggatatcgaacccctatctacatgctcaactgaatcatacagttgcaagctgttttagaaattattactaataaaaccggtcaagccttgaccgttcttgcccagcaagagactctgatgagaaatgctatctatcaaaatagaatagttcttgacaacttggtagcagctgaaggaggagtttgtagaaaatttaaccgtactaattattgtctacacatagatgatcaggggcaagtagttgagaatatagttaaagatataacaaaactggcacatgtacctgtgcaagtgtggcatggactcagtccgggagccatgtttgaaaattggttcccagcaataggaaaatttaaaactcttgtaataaaaataataatagtaataggaacctgcttactgctcccttgtcttatacctgtatttctccaaatgataaaaaacttcgttgccaccttagttcacaaaaatgcttcagcacaagcatactatgtaaatcactatcaatctattgcacaaaaagacataagtagcaaaaacaaaagtgagaactcccactaataaaaagtgagagtctcaaagggggggaaatgagggaagagagagaccctctcatattgttttatattattttatactcagtacctgttttaagaaaaaacaacaaagaagtaaaatcaaagacaggcagcccggcaccaggcctgaaascaggcctgggcctgcctggcctaaacccagtagttaaaaatcaacccataacttagaaactgatgttattcatagattccagccattgtatagaagaacattgtgaaattccctgccctgttctgtttctctctgaccaccggtgcatgcagcccctgtcacgtaccgcctgcctgctcaaatcaatcacraccctttcatgtgaaatctttagtgttgtgagcccttaaaagsgacagaaattgtgcactcggggagatcggattttaaggcagtagcttgccgatgctcccagctgaataaagcccttctacaactyggtgtctgagaggttttgtctgtggctygtcctgctacaagctgagattgcatcacatacccctgcactccagcttgggtgacagagtgagaccctatccaaaaaaaaaaaaagaaagaaaaagaaagaaagaaaagaaaagaaaataatgcctggctggacactgtggcacatgcctgtaatcccagcactttgggaggccgaagtgggaggatcacttgagctcaggagttttagaacagcctgggcaacagtgtgggaccttgtctctacaaaaaatacaaaaacaaaaacaaaaacaaaaacaaaaaaccaggtgggtatagtggaatgcacctgtaatcccagctactcgggaggctagggtgggaggtttgcttgaacccagggggtcgaagctgcaatgagccatggtcatgcagctgcactccaccctgggcaacagagaaagatcctggttgtgttttttttttaattatgcatgacctcatttatgatgagggatgttttgggggtgtgaggaaacactgttggtgggggatgtaaatgagtacaacttccttagcaaataatctgttaatatctatcgaaaatttcagtttgcatatcctttgacatagcaatattacatctaggaatttattctactttttttttttttttgggggggacagagtcttgctctgttgcccaggctgaagtacagtggcacgatctcggctcactgcaatcgacctccacctcccgggttcaagcaattctactgcctcagcctccccagtagctgagattacaggcgcctgcaacaactcccggctagttttcgtattttttttttttttctgagatggagtctcattctgttgcccaggctggagggcagtggcacgatctcggctcactgcaagctccgcctcctcggttcacgccattctcttgcctcagcctcccgagtagctgggactacaggtgcccgacatcacacccggctaattttttgtatttttagtggagacggagtttcaccatattagccaggatggtatcaatctcctgacctcgtgatccgcccgccttggcctcccaaaatgctgggattacaggcgtgagccaccgcgcttggcctagtttttgtatatctagtagagacaaggtttcaccatgttggccacattggtctcgaactcctgacctcaacggatcagcctgcctcggcctcccaaagtgctgggattacaggcatgaacctccatgccttgccctattctactatttttaatgtgctaaaaaatgaacctcagccaggcacggtggctcactccagtaatcctagcactttggaaggccaaggcgggtggatcacctgagatcaggagtttgagaccagcctggccaacatggcgaaaccccgtctctactaaaaaatacaaaaattagctgggcgtggtggcacttgcctgttatcccagctactcgggaggctgaggctggagaatcacttgaacccgggaggcggaggttgcagtaagctgagatcgcgccactggactccagcctgggtgacagagcaagactccatctcaaaaaaaaaaaaaaatatatggacctcaactcctcaacttaaatatccttcaataggggatatacatacacatacacactttttttggtgtgtgagagatggagtctcactctgtcccccagactgagtgcagtggtgcaatctcagctcactacaacctctgtgttgaaaaaaaaatcattgaattgtacacctaaaatgaatgaaattgatggcatgtaaattatacctcaaaaaagaggttgaaaggaaaagaaaaggggccgggcgtggtggctcacgcctgtaatccccaacactttgggaggccaaggcaggtgtatcacctgaggtcaggagttcaagaccagcctggccaacatggcragttcctgtctactaaaaatacaaaaattagctgggcgtggtgtctggcgccgttaatcccagctactcgggaggctgaggcaggagaatcgcttgaaccagggaggaggaggttgcggtgagcccaagatcgcgccattgcactctagcctgggcaacaagagctaaactccgtctcaaaaaaaaaagaaaagaaaagaaaagaaaaggattgataaattgataaggaccagtgtattactgggagcgtcagaaaacaagtaattccaagaatttaactagagaacaatctcagcataaattaaaaaacatcttttttttttttttgagacggagtctcactctgtcacccaggctggagtgcagtggcaggatattggctcacagcaacctccgcctcccgggttcaagcgattctcctgcctcagcctcccgagtagctgggattacaggcgcccgccaccaagcctggctaatttttgtatatttagtagagacacggtttcaccattttggccaggctggtcttgaactcttgaccttgtgacccacccgcctcagcctctcaaagtgctgggattacaggcgtgagccaccgcgcctggcaaaaaaaacatttttttttttaacctgcacattctttgacctggcatcttcacttctggaaatttattacaggccaggcacagtgtctcacacctgtaatcccagcattttgggaggcccaggcgggcagatcacctgaggtcaggagttcgagaccagcctgaccaacatggagaaaaccggtctctactaaaaatgcaaaattagccaggggcagtggctcacgcctgtaatcccagcactttggaagcctgaggcaggctgatcacgaggtcaggagatcgagaccatcctggctaacacggtgaaacctcttctctactaaaaatacaaaccattagccgggcgtcgtggcgggcgcctgtagtcccagctactcaggaggctgaggcaggagaatggcgtgaaccccggagtcggagcttgcagtgagccgagatcgcgccactgcactccaacctgggtgacagagtgagacactgtctcaggaaaaaaaaaaaaaaaaaattagccaggcatggtggcacatgtctgtaatcccagctactcaggaggctgaggcaggagaatcgcttgaacctgtgaggctgaggttgtggtgagcagagatcatgccattgcactccagcctgggcaacaagagtgaaactctgtctcaaaaaaaagcataaaaaaaagaaatttattctaaggaaacagttaattgggcacaaacatttgtacaataatatttcctatagtattgtttagaatattgaatatctgaaaataattcaaggctgggtgcggtggctcacacctgtaatcccagcagtttgggaggccaaggctagaggattgcttgagctcaggagttcaagaccagcctgggcaacatggcaaaaccttgtctctgctaaaaatagaaaaattagccaggtttggtggtacatgcctgtagtcccagctactcaggaggctgaggtggggagaatcgcttgaacctgggaggcagaggtttcagtgaaccaagatctcatgccacggcgctccagcctgggtgacaaagtgagactttatctcaaataaataaataaataaataaagtcagggtgtggtggctcacgcctgtaatcccagcactttgggaggcagaggcaggtgggtcacgaggtcaggagttcaagaccagcccggccaagatggtgaaatcccgtctctactaaaaatacaaaaaaaaaaaaaaaaagagacttgcatggtggcgggcacctgtagtcccagctacatgggaggctgaggcaggagaattgcttgaacctgggaggcagaggttgcagtgagccgagatcgcgccattgcactccagcctgggagcgagactccgtctcaaaaaaaaacaaaaaacaaaaaaacaaaaatcagccggatgcagtggcagacgcctgtaatcccagctactttggaggctgaggcgggagaattgcttgaacccaggaggcagaggttgcagtgagccgagatcacacgactgcactccagcctgggtgacagagtgacactatctcaaaaaaaaattcaaaagttctctaatagagaattagttaaataaatatggaaggctatgcccctatcaaagagcatgaggcaggtttccatgtattgacacaaaagatatttatgatatacatttttattattatggaacatctgcaacatatacaaaggtagaggaaatgtattacagtgagctctcatgcactccttatccagcttcaacaattactaactgtgagaagtcttgtttcattaatacttccacttgtttacatttttttcttttcttttttttgagatggagtctcgctctgttgcccagactggagtgcagtggcgtgatctcggctcactgcaacctctgcctgccaggttccagtgatcctcctgcctcagcctcccaagtatctggaattacaggcacccaccaccacacccggctaagttttgtatttttatttatgtatttatttattattttatttatttatttatttatttgagactgagtttcgctgttgttgcccaggctagagtgcaatggcgtgatctcagcttaccacaacctccacctcccaggttccagcagttctcctgcctcagcctccggagtagctgggattacaggcatgtgccaccatgcccagctaattttgtatttttagtatagacagggtttctccacattggtcaggctggtctcgaactcccgaccttgagtgatccgcccgcctccgcctcccaaagtgtatttatttattttttagagacagagtctcactctgtagcccaggctggagtgcagtggcataatcttggctcactgcaacctctgcctcccaggttcaagcaattctcctgcctcagcctcctgagtagctgggaatacaggcacacgtgaccaaacctggctaattttttgtattttagtagagacgccctgttgtcccggatggtctggaactcctgagctcaggcaattcacccccctcagcttcccaaagtgctaggattacaggtgtgagccaccttgcccggcaatttttgtatttttagtagaggctgtgtttcaccctgttggccaggctggtctccaactcctgaactcatgtgatccacccacctcagcttcccaaagtgctgggattacaggtgtgagccaccgcacccggcccacttgcttaccttttatattattttgaagtaaatccaagatatcatttcatctgtaaacataaccatacacagtattattatcatgctttaaaaagtagtaaacccaggctggacgaggtgactcacgcctgtaatcccagcactttgggaggccaaggcgggcggaacacgaggtcaggagatcgagaccatcctggctaacatggtgaaaccccgtttctactaaaaatacaaaaagaaaattagccgggcatggtggcggatgcctgtagtcccagctactcgggaggctgaggcaggagaatggcatgaacccgggaggcggtgcttgcagtgagctgagatcatgccactgcactccagcctgggagacagagcgagactctgtctcacaaaaaaaaaaaaaacaacaaaaagtaatatacccttaatatgctcaaatatctagtcattgttcaaatttccaattgtcttataaacttcatttttaatagttttttgaagcggaatgtaaacagggttcatacattgtgattgattgttatgcttcttaaatatcatttttaacagctttattgagataaaattcacataccatgcaatccactcatttaaaaagtacgattcaatcgattttagtatattcacagagttgtttgtccattgccacaatcacttttattaattttgctttgttttgttttgagacagtctcgctctgtcaccccggctggagtgcagtggttctcaccatgtctcaccatgttggctaggctggtctcaaactcctgacctcaggtgatccacccaccttggcttcccaaagtgctgggattataggcatgagccaccatgctcggcctggaagaattttattaagagaaattttctggccaggcgtggtagctcacgcctgtaatcccagcactttgggaggccaaggtgggcggatcacgaggtcaggagattgagaccatcctggctaacacggtgagaccccttctctactaaaaatacaaaaaattagctgggcgtgttggtgggcacctgtagtgccagctactggggaggctaaggcaggagaatgatgtgaacccgggaggcggagcttgcagtgagctgagatcgtgccactgcactccatcctgggcaacagagcgagactccgtctcaaaaaaaaaaaaaagagaaaccttccctattttgttaacctatggcatgatacagtttttttgtttgtttgtttgtttgttttgtggagatagagtctcactctttcaccttgggctggagtgcartggcaggatcttggctcactgcaaccccgcctcctgggttcaagcaagcatatgtggctaatttttgtatttttagtggagatggggttttgccatgttggctaggctggtctcaaacccctgacctcaaatcatcagcctgcctcagcctcccaaagtgctgggattgtaggggtgagccaccatacctggcatggcatgacatagtcttgacaaataaaagtactttatagaacactcaagttcatagcagcattactcacaatagccaaaaggtagaagtaacccaagtgtccatcagcagatgaagggataaacacaataaatatccatataattcagacttaaaaaggaaagaaattctacacatgctacaacatagatgaacctagaagacatcatgctaagtaaaataagccagtattccaaaagacaaatactgagggattctaccaatgtgggtagaatcccttggtaaaatatatatatataaaacagagtctggtcacagtggcccacgcctgtaatcccagcactttgggaggccgaggcgggcagatcacctgaggtcaggagttcaagaccagcctgaccaacatggaaaaaccctgtctctactaaaaatacaaaggaattagccgggcatggtggcgcatgcctgtaatcccagctactccagaggctgacgcaggagaatcatttgaacccaggaggcggaggttgcggtgagcgatcatgccattgcactctagccagggcaacaagagcaaaatccatctaaaaaaaaaaaaaaagcattttcattatatgtatattactacaataaaaaaatgtttaagtacattgcagaatgaaatactagttggcaacaaaagggacgaatgttgacgcacacaatttagatggatctcaagggaattacgtgactgagaaaagtcaatctctttttttttgagacggcgtctcgctctgtcgcccaggctggagtgcagtggtgcgatctcagctcactgcaacctccacctcccgggttcaagtaattctcctgcctcagcctcctgagtagctgggattacaggcgcccaccaccacgaccagctaatttttgtatttttagtagagacggggtttcaacatgttggtcaggctggtctcgaaaccctgacctcatgatccacttgcctcggcctcccaaagtgctaggattacaggcatgagccaccgcacctggccagaaaagtcaatctcaaaaggtcacatactatatgattccatttatataacattctcaaaatgacaaaattatagacagaaaatacattagtaattgccagggcttagggagataggggtgtatgtgtgtgattctaaagagatgacatgagggagatctttgtggtgatrgaatagttctgtatcttgattatggtgatggttacgggaatctgtacatatgataaaatggtataaaactatatacacacattgtaccaacatcaatttcctaatttatttttttttagacgggatcaccgtctgtcacccaggcgggagtgcagtggctcgatctcggctgactgcaacctctgcctcccgggttcaagcgattctcctgcctcagcctcccaagtagctggaactacaagtgcccgccaccatgcctggctaatttttgtatttttagtagatatcgtgttgggtttcgccatgttggccaggctggtctcaaactcctgacctcaagtgatccacctgcctcagcttcccaaagtgctgggattacaggtgtgagccactgtgcccggacaatatccttgttttgacattgtactatgtatatattttctgagacggagtttctttcttgttgcccaggctggagtgcaatagcacaatctcggctcactgcaacctccgcctcctgggttcaagcgattctcctgcctcagcctcccgagtagctgggattacaggcatgcaccactacgcctggctaattttgtatttttagtagagatggtgtttcaccatgttggccaggctggtcgcaaactcccaacctcaggtgatcagcctgcttcgacctcccaaagtgctgggattacagccatgagccaccacgccgggctatactataattatataagatgtaaccattgggggaaaatggatgaagggaacactggaactctctgtactatttttgctagttccagtgaatctataaatatttttaaaaataacatttaaatagtacatcgacataaccttctatgtgacataaacccatctttgtttaaaaaaaagttagctgggtgttgtggcgggcgcctgtagtctcagctactcgggaggctgaggcaggagaatggcgtgaacccgggaggtggagcttgcagtgagccaagattgtgccactgcactccagcctaggcgacagagcaagactccatctcaaaaaaaaaaaaaaaaagaataatagctatctaattatctgttattatcccagtataccttagaggaaaccaatgtgcaggtttgattgttagcctgtattcttaaccactatgacatacagtgtctatatttgtgtatacaatatttacattaaaaagtttgggtcaggcacggtggttcatgcctgtaatgccagcactttgggaggccaaggtgggcggatcacctgaggtcaggagttcgagagcagcctgcccaacatggcaaaaccctatctctactaaaaatacaaaaaaaatttgctgggcatggtggcaggcacctgtagtcccagctactcgggaggctgaggcaggagaattgcttgaacctggaggtggaggttgcagtgagccgagatcgtgccactgcactccagcctgggcgacaagagcaaaactcagtctcaaaaaaaaaaaagtctggatgcagctgggcacggtagctcatccctgtaatcccaaccctttgggaggctaaggcgggtggattgtttgaggtcatgagttcgagagcagcctggccaacatggtgaaacactgtctctactaaaaatacaaaaattagctgggcgtggtagcatgtgcctgtaatcctagctacttgggaggctgaggcaggagaatcacttgaacctgagagatggaggttgcagtgaactgagatctggccattgtactccagcctgggccacaaagtgagactctgtttcgaagaaaaaaaaaaagcggggggaccgggcatggtggctcacgcttataatcccagcactttgggaggccgaggtgggcggatcacaagttcaggagttcgagaccagcctggccaacacagtgaaacctcgtctctactaagaatacaaaaattagccaggcatggtggtgggcgcctgtaatcccagctactcaggaggctgaggcaggagaattgcttgaatccaggaggcagaggttgcagtgagccaagatcgggccactgcactccagcctgggccacagagctagactccatttcaaaaaaaaaaaaaaaaaaaaaaggtacacatagggctcaatgctggcacctgtagtcagaactactcagtagctgaggtgggaggatcatttgactccaggagttggagtttagcctgagcaacataactagaacaaccctacaaaaaaaaaataataaaaataaaaagtctccgggctcagtggctcacacctgtaatcccagcattttgggaggctgaggatggcggatcactggagttcaggagttggagactggcctggccaacatggtgaaaccctgtctctactaaaaatacaaaaattagccgggtatggtggcacacaactgtaatcccagcactttgggaggctgaggtgggcagatcgcctgaggtcaggagttcaagaccagcctggccaacatggcaaaaacccatctctactaagtatacaaaaagtagccgggcatggtggcgtgcacctgtaatcccagctactcaggaggctgaggcaggagaattgcttgaacctgggaggcggaggttgcagtgagctgagatggtgtcactgcattccaccctgggcgacagagcgagactccatctcaacaacaacaacaaaaagtgtgaattcacgagtaccatttgttagtgatagttattcctgggaaggtagagtggtagagaaacaggcttacaggcatgagccaccacactcagcctggaagaattctattaagagaaactccctaacctactattttgttaacctatggcatgatacagtttgttttgttttgttttgtggagatagagtctcactctttcaccttgggctggagtgcagtggcaggatctcggctcactgcaaccccgcctcctgggttcaagcaagcatatgtggctaatttttgtatttttagtggagatggggttttgccgtgttggctaggctggtctcaaacccctgacctcaaatcatcagcctgcctcagcctcccaaagtgctgggattacaggggtcagccaccacgcctggcatggcatgacatagttttgacaaataaaagttctttatagaacactcaggttcatagcagcattactcacaatagccaaaaggtagaagtaacccaagtgtccatcagcagatgaagggataaacataataaatatccatataattcagacttaaaaaggaaataaattctacacatgctacaacatagatgaacctagaagacatcatgctaagtaaaataagccaactgtatgggtttgtttctgtgttgttttaatagtttacacaaacatatgtaactttttatttgttcattgagacggagtcgctctgtcgtccaggatggagtgcagtggcctgatctcagctcactgcaacctctgcctcccaggttcaagcgattctcctgcctcagcctcctgagaagctgggactacaggcgcgcgccaccatgcctggctaatttttgtatttttagtagagacgaggtttcaccatgttggtcaggctggtctcgaactcctgacctcgtgattcgtctgcctcagcctcccaaagtgctaggattacaggcgtgagccaccgtgcctggcatatgttactttttaaattaaacaaaaatattaaagaaattttcatggggctgggggaagaaggtaaactttgtgtgacacccctcctttatgaactaatggagaacatataccctacattagttrcattattctggaagatgaacgcttggcacagtgagctgccaaactgttagggtgtcctcctttccccgctccactttatatccatctctttggccattctgccttccgtgggcccagcttccctctatacccacgtagatcctggattgcacgtcagtaggcgggctgcagaggaagggcgctgttctggttggtcctggccttaccccgccggagggcgccagctgccccggcgacgacacgggggaccggacggagcctcgggccgccagggaggggcctggctgcagaggcagctttctcactagcgactcgggcctctcaaaaccagcctttaggcatttaaaaagtgatacggttcacgccggtcttcgccaccagatcccaattctttcctgagagcagtgctgaagtgacaataggcccatagcattaaatgtcgtctgcttccttcttcaaagaagaccgacttcaaccaaaagttcaatttccttaatgtaaattagagggaaatcagcaatcacactatctggagtaggcacaatttgcatgaagcctttgacaggtgttcacttcattttcttttcccacagagagccattgaaggcagcaggaatgtcaatggagtgatttagggaaccccacagaagacaaaggattttttttctatttctttgttgttgataacaaaagcaaaatatgcttatttaaactgtaaataatgtgacagagtataaagcaaaaagtgaaagaatcttccttcactttctcatgcaattgcacagggataactaagtaactgctgttaaaaatgtgttactcatctgtctagatcttttttctttctttctttttttttttttttaatagagatgaggtcttgagacgttacccaggctggtctggaactcatgcagtcctcccacctcagcctcacaaagtgctgagattacaggtgtgagccactgcaattttttttttttttttagacagagttttgctcttgtcgcacaggctggagtgcaatggcgcgatctcggatcaccgcaacctccacctcccaggttcaagcgattttcctgcctcagcctcccgaagtagctgggattacaggcgtccaccacaatgctcagctaatttttttgtacttttagttgagacagggtttcaccatgttggccaggctggccttgaactcttgacctcaggtgatctacccacctcagcctcccaagtgctggtattacaggcgtgagccactgcgccctgccaagctactgcattctaaccacacacacacacacacacacacaccccaaaattttatgaagattaaagaaaaccttttattgaggtataacttacaataaatagtgcacatttaagtgtgcagctcctttaattttttacatatgaatacatcattgagactttctgtaacccactttatactgtagtttgctttttttttctttttttagacagtcttgctcttttgccaggctggagtgcagtggcgcgatctcggctcactgcaacctctgcctcccaggttcaagcgattctcctgcctcagcctcccaagtagctgggactacaggtgtgcatcaccacgcccggctaatttttttttgtacttttagtagagatggggtttcaccatggtggccaggatggtctcgatcttttgacctcgtgatccacccgcctcggccttccaaagtgctgggatttcaggcgtgagccactgcacctggcctgctttcttaactcaacaatgctgtggtagttcttccatagggacatacagatctaactcgatctaactcacgctttttatggtggaatagtattccatagtattaattatggtaatctaattaacttttcccaattgatggatagattgtcttcaattttattatttttagatatgatagggatctctatgttgcacaggccggacttgaattcctggactcaaggtatcctcctgcctcggcctctagagtagctgagactataagcatatgccactgctctcagctttgtcttctatttttttttttttactattgcgtgttaccagattttaaattttcttttttttttttaattttttttgtggtggagtctcgctctgttgcccaggctggagcacaatggcatgatctaggctcactgcaacttccgcctcccgggttcaagtagttctctgcctcagcctcccgagtagctgggattataggcaccacccaccatgcccagctaatttttgtatttttagtagagacagagtttcaccatcttggccaggctggtcttgaactcctgacctcctgatccactcgcctcgacctcccaaaggtctgggattactggcgtgaaacactgagcccagcctacattttkttttttttggaaacagagtcttgctctgtcgcccaggctgcagtacagtggtgtgatctctgctcactgtaacctccatctcccaggttcaagtgactattctgcctcagccccctgtgtagctgggattacaggcatgtaccaccatgcccagctaatttttgtatttttttaagtagagatggggtttcaccatgttggccaggctggtctcgaactcctgacctcaagtgatccacccgcctcagcctcccaaagtgctgggattacaggcatgagtcaccgtgcctggccttaaattctatttctttctttttatttttttcttttgagacagttctgctcttgtgacccaggctggagtgcaatggcgtgatcttggctcactgcaacctccttttcctggcttcaagcgattctcctgcctcaacctcccaagtagctgggattacagctgcccaccaccatgcccrtctaatttttgtatttgtagtagagacgaggattcaccatgttggccaggctggtcttgaactcctgacctcatgatccgccctccttggcttcccaaagtgctgggattacaggcatgagccactgagcctggctgcctggctaatttttgcattttcagtagagacagagtttcaccatattggccaggctggtcttgaactcctgacctcatgaaccacttgcctcggcctcccaaagtgctgggattactggcgtgagccgactgtgcctggcctaaattttcttttgtttgaaacagagtcttgctctgtcacccagcctggagtacagtggtgagatctcagctcactgtaaccgccacttcccaggttcatgtgattattctccctcagccccatgtgtagctgggattacaggcatgcaccaccacgcccagctaatttttgtattttttaaagtagagatggagtttcaccatgtttgccagactggtctcgaaatcttgacctcaagtgatccacctgccttagcctcccaaagtgctggaattacaggcgtgagccaccgtgcctggccttaaattttctttctttctttcttctttctttcttccttccttccttccttccttccttccttccttccttcctttctttccttctttctttcttttctttctttctttttttttgacagagttttgctcttgtgacccaggctggagtgcaatggcgtcatcttggctcactgcaacctccttctcccggcttcaagagattctcctgccggccgggcaaggtggctcacgcctgtaatcccagcattttgggaggctgatacgggcggatcacgaggtcaggagatcaagaccatcctggctaacacggtgaaatcccgtctctactaaaaatacaaaaaaattagacaggcgtagtggcgggcgcctgtagtcccagctacacgggaggctgaggcaggagaatggcgtgaacctgggaggcggagcttgcagtgagctgagatcgcaccactgcactccagcctgggtgacagagcgagactccgtctcaaaaaaaaagtggctcacacagcaaaggatgtggccaagtcatgtatctatcatgagtcagggggtaatttgtaaagacaagaacagaaaatgccatgtatttttagtagagacgcggtttcaccatattggccaggatggtctcaatctcttgacctcgtgatccacccagctcaacctcccaaagtgctgggattacatgcgtgggccaccatgcctggcttttttttttgttcttgagatggagtcttgcctgtcacccaggctggagtgcagtgacatgatctcggctcactgcaaccaccacctcctgggttcaagcagttctctacctcagccttccragtagctagaagctggaattacaggtgcctgccaccacacccggctaattttattttatttatttttttattttttttgagacggagtctcgctctgttgcccaggctggagtgcaatggtgtgatcttggctcactgcaacctctgcctctcaggttcaagtgattctcctgcctcagcctcctgagtagctgggattacaggcgcctgccaccacgcccagctaatttttgtatttttagtaaagacagtgtttcaccatgctggccaggctggtctcgaactccccacctcaggtgatctgccagcctcagcctcccaaagcgttgggattacaggcgtgagccaccgagcctggccaaagtttcattataaatttaatggctgggtgtggtggctcacgcctgtaatcctagcactttaggaggctgaagcaggcggatggtttgagcccaggagatcaaggttgcagtgagctacaattgcaccactgcattccagcctggatgacaaaggaagactcygtctcaaaaaawaaataaataaataaacgttcccttcaaataatacctccaaaaatgacagattttgtaggcaactcatatatgcacggcctctcattcaagtgttcctcgttttcccacctcctctataagatatagaggaaggttgggggactgtctgtggattgaaccgccagactgttttccagacagaaatcccccaagattgctacacggagtgtgggctgagcctgcaggaaacgatccatcctctgctgatgcactgtcatcccagccacaagatcacaggaaaaggagtggttgaggcctctgggaacccaaaaccccagcttcacaaggactgagcttgtagatttccctcatgggcaaaaggttggctaggagcagtcttttataatccctcttttctcacaaaaatcatcatcatcatcattatcgtcattatcaatatttatcgagcatttccttcacaccacgaactttatacacaccacttgttatttaacctcacaatctatgaatatgctaacattatctccattttactaatgagaaaaaccaggtttcaagaagtcaagtaacttgtccaaacttcacagtatggcctaataaatagcagagtagggcttgaacccactgacttcaaagccctggttcttttttttttcttttttttttagatggagtctcactcttttgcccaggctggagtgcagtggtgcgatctcagctcactgcaacctccgtctcccgggttcaagcgattctcctgcctcagcctcctgagtagctgggattacaggcgcgtgccaccatgcccagctaattttttgtatttttagtagagacggggttttgccatgttggtcaggcaggtttcgaactcctgacatcatgatctgcctgcctctgcctcccaaagtgctaggttacaggtgtgagccactgtgcccggtcttaaaagccctggttctaaaccactgagaggtgacaacgtgctagcagccctcactcattctgggcgcctcctcggcctcggcgtccactctggctgcgcttgaggagcccttcagcccgccgctgcactgcgggagcccctctctgggctagctgaggccggagccagctccctctgcttgcggggaggtgtggagggagaggcccaggcaggaactggggctgcgcgcatggcactcgagggccagcgcgagttccgggtgcgcggggtcttggcggccccgcactccgagcggccggctggcgccgtgggcccaggaagtgaggggcttagcaccctggccagccgctgtggagggtgcactgggtcccccagcactgcaggcccacctgctctgcgctcaaattcttgccgggcctcagcacctgcccgcagggcagggctagggatctgcagcccgccatgcctgaacaccctccccctacaccgtgagctcgcggggctggagactccccgacggggcgccaccccctgctccgcggcgccccatcccatcgaccgcccaagggctgaggagtgcagctgcgcagagcgggactagcgggcaactccgccccggcccrgcacaggatccactaggcgaagccagctgggctcctgagttgggtggggacttggagaacttttatgtctagctggaggagtgtacatgcgccaatcagcactctgtgtctagctcagggttcatggatgcagcaatcagcactctatctagctaatctggtggggacttggagaaactttatgtctagctaaaggattgtaaatacaccaattagcactctgtgtctagctcaaggtttgtaaacacactaatcagcaccctgtgtctagctcaaggtttgtaaatgcaccaatcagtgctctgtgtctaatctagtggggacttggagaacctttatgtctagctaaaggattgtaaatacaccaatcagcattctgtgtctagctcaaggtttgtaaacacaccagtcagcagtctgtgtctagctcaaggtttgtaaacgcatcaatcagcaccctgtgtctagctcaaggtttgtaaatgcaccaatcagtgctctgtgtctagttaatctagtggggacttggagaacttttacctcaggctggaggattgtaaatacagcaatcaacactctgcgtctagctcagggattgtaaatgcaccaatcagcaccctgtcaaaacagaccaatcagctgtctgtaaaatggaccaatcagcgctctgtaaaatggaccaatcagctctctgcaaatgggccaatcagcaggatgtgggtggggtcagaaaagggaataaaagcaggctgcctgcgctagtagtggcaactggctcaggttctcttccacgctcacgctatgggagttttgtttttttgatctttgagataacttgctgctgctcattctttgggtacacactgagtttatgagctgtaacactcttcgtgaagctctgcagcctcaatcctgaggccaccgagaccatgaacccatgggaggaatgagtaactccagacgcgctgccttaagaggtgtaatactcactgtgaaagtctgcagcttcactcctgaagccagtgagaccacaaatccaccagaaggaagaaactccaaacacgtctgaacatcagaaagaacaaactccggacataccatctttaagaactgtagcactcatcatgagagtctggggcttcattcttcaagtcagtgagaccaagaacccaccaattccagatacaccacagtatcattgtactacacggctctcagcaccactgaccttggtatgggaaaaagcacaagtgtgcataccatcttattctccttttagaatatttcaccggcgggggaggggggaggtcacacctgtaatcccagcactttgggagattgaggcgggtggattgtctgargtcrggagttcgrgaccagcctggccrrtatagtgaarccccatctctactgaaattrcaaaaaattagctggatgtggtggtgggtgcttgtrattccagctrcccrggaggctraggcaggtcttgaattgcttcaacccatgaggcrgaggttgcrgtgagctaagatcgtgccattgcactccagcctgggcaacaagagtgaaactccatctcaaagaaaaaaaaagaatatttctccaggagaactccacacttgcacaatatcttctccaaggacagaagagggacaatatttgtccttcctactggattttgaaaccctttgcactgagtgtagactgtagttctgtgacataccatgaagagtgtgtgtgtgttttaagggagctactgtcttacccaaaacctgtgaatataaagtgttttttcatgaattgctcattattcagccagtcgttaatgaattcattcaacaagtgtctctgagatgctagacactggggattaaaagaggaacaacagagacaagatctctgccctccagaaactgacagtctattgaatgagacagttgtctaacaatcacaatcaagtgtgatcaatctctggtgacaggactctaacctagaggcatgtgcctaatctggggtgactggttagggaaaacttccaaaaaagttgtgacttttaggctaaaaccagactgctaataaacataaagtgttacaggaagtaagtggcaaagctactgtcatttttttacttagcaatttcaatgaagtggggcatggatatggtgccagatcccaacaatagaataaatgctggtaagcagaacacatcccaaatctaattactttaatgagagagaacaacagtacaaaaggaatgtaaaatcaagtataattccttggataaaccactgttcccacttttggccatgaaaaaatgagttactacaaactgacaaagcttacctttccaaataaatagattagcctctaatagataagctctaatagctaactttttttttttttttttgagacggagtctcactctgttgcccagactggagtatagtggcgttatctgggctcactgcagcctccccttcctgggttcaagcaattgtcctgcctcagtctcccgcgcagctgggattacaggtgtgcaccaccacgcctggctaacttttttttggtatttttagtagagacggggttttgccatgttggccaggctggtctcgaactcctgacctcaggtgatccacctgcctcggcctcccaaagtgttgggattacatgcatgaaccaccgtgcccagcctctaatagctaacttctttttttgtttcttttttcttttttcttttttttttttttttgagatggagttttgctcttgttgtccaggctggagtgcaatggcgagatctcggctcacggcaacctccgcctcctgggatcaagtgattctcctgcctcagcctcccgagtagctgtgattataggcatgtgccaccacgcttggctaatttttttttttttttttttttttgagacagagtttctctcttgttgcccaggctggaatgcaatggcacgatcttggctcaccgcaacctccacctcccaagttcaagcgattctccttcctcagcctcccaagtagctgggaatacaggcatgcgctaccatgcccagctaattttgtatttttagtagagacggggtttctccatgttagtcatgctggtctcgaactcccgatctcaggtgatccacctgccttggcctcccaaagtgctgggactacaggcatgagccaccgcacccggcctctaattttgtatttttagtagagaccgggtttctccatgttggtcaggctggtccagaactcctgacctcaggtgatccgcccgccttggccttctgaagtgctgggattacaggcataagccaccgctcctggcctctactagctgacatctaatagtggtatcatcttacagagtctagaatgttttgagacaatcttacatttaaaaactataccttacgaaataccagaaaaagggatcatactgatgcagctaggaaatcaataacaggttattcaatactgcttcatcagccattctcataaaacacgatgagctcccctatagggttgctgagatccggaaatagggagttcccaaactgcttgggctgtactctctattcagtagtactttttaccacagcagtcatctgtctatttatattaatgagactgttgtccttatcatttaatctccagctatatcacagctgtcagctgtgggaacacctttgccaagggaaagcctctaaatactaaaatgtttgcagcactaggttaacaaccaagaggggagatcaaactccaggaacatgcagkgtgcttgcaatttcagtaaggtaacagaaggtaaaccagggcctgtatgatccacatggggtgagtgggaagaaaaatgaccccaaggcaaaatcaattatataaggcctgaaaattctttacaccctttaaaaatttataatattgtttctatacatatatccaatgtacatacaataaatctttaatgtttggttccatgagttatttatttatttatttaaattttttgagatggaatcttactctgtcacccaggctgggctgcagaggcgcgatcttggctcactgcaacctctgcctcccrggtttaagcgattctcgtgcctcagcctcctaagtagctgggactacaggtgcccgccaccacgcctggctaatttttatatttttagtagagatggggtttcaccatgttggccaggctggtcttgaacttctgacctcaggtgatctgcctgcctcagcctcccagagtgctgggattacaggcatgagccaccacgcccggccaaggttccatgagttttgacaattgtataaacttgtataacctccaaccaaaacaatagaaagaacatttccattaccctaaagaatttccttgatcgcattttttttttaaaggctcatgcagacagaataatactgagaatggggtctcattgtgttgcctaggctggcttcaaactcctgggctcaggtgatcctcccacctcagcctcccgagtggctgggaccacaggcacgtgccactgtgccagggctctgactctttccctgacaaatcatctcgccaaagtcaccacctgacttcacacaacaaaaattcgttttgtctgtttttgaacttcatttaatggaatcatacagcccatattctgtttttgttttgcttatcattttgagatccacccatgttgagtgtatcaatagtttgacctgttgttggtgttgagcagtgttccattgtttgaatgtgtcataatgtgttattccatcctcctgtggatggatacttgggctgtctctagttttggactatatacaaaaaaggctgctataaatatttgtgtacaactctttttggggacatatattttcatttttcttgcataccaaagagtagaacggctgcgtcatatggtagatgcatgtttaacttaataagaaatcaccaaacagttctcctaactgattataccattttacatccccacttgcaatgtatgagagttccaattgctgtacatccttgtcaccatttatttctgtcaatgttttttattttagccattctagtgggtatgaaatgatatcgtgatttttttttttaaggctagtcaggtgaagcagtgggcacggaaaagggacaaagaaatctgtaactggttgtgatcaattagttgtaaacatcacatcattcatattagccgctcattgtgactttaacttgcatttcctcttatttttttttgttttttgttttttttttttgagacagggtctcactctgtcacccaggctggagtgcaatggcrcaatcttggctaactgcaacttctgcgtcccaggttcaagcgattctcctgcctcagcccctgaagtagctgggactacaggcatgtgccaccacacctggctaatttttgtattttttgtagaggctgggtttcactgcccaggctggtctcgaactcctgaggtcaagtgatccacccaccttggcctcccaaagtrttgggattaaaggtgtgagtcactgcacccggcctaacttgcatttccttgatgattaatgaattccaaataattttaacattatttgaaaattatttgaaattatttgaaaataatttgaaaattatttggaaataatttgaaaataacacttgatcaaagaataaattccaaggaaaattagaaaaacattgaactgaataaaaatgaaaacccaacatatcaaacttgtagcgtgtggcaaagcagtgtgcttttactggaaagtgcttttatcaggaaaaaagaaaattataaaattggtcatctaaactcctactttaagaatctagaaaaacggccagatgtgctggctcatgcctgtaatcccagcactttgggaggccgaggtgggcagggatcacgaggtcaagagatagagatcatcctggccaacatggtgaaaccctgtgtctactaaaatacaaatattagctggggatggtggcacatgcctgtagtcccagctacttgggaggctgaggcaggagaatcgcttgaacccgggaggcagaggttgcagtgagctgagatcacgccactgcactccagcctggtgacaaaggaagactccatctcaaaaaaaaaaaaaaaaaaaaaaaaaaaaaaggccaggcacggtggctcacacctgtaatcccagcacttcrggaggctgaggtgggcggatcacctgaggtcaggattttgagaccagcctgaccaacatggagaaaccccgtctctactaaaaatacaaaatcatctgggcatggtggcacatgcctgtaatcccagctactcgggaggctgaggaaggaaaatcacttgagctcgggaggtagagattgcggtgagctgagatcgtgccattgcactccagccagggcaacaagggcaaaactccatctcaaaaaaaaaaaaaagaaatcaaacattagctgggcgtggtggtgcatgcctgtaatcccagctacttgggaggctgaggcagaatcacctgaacccgggaggtggaggttgcagtgagctgagatctctgccactgtactccagcctgggcaacagagcaaggctctgtctcaaaaataagtaaacaaataaacttaaaaaaaaaaggaagctagaaaaataacaaattaaagtaggtagaaataacagaagaaatcaataaaatagaaaatggattgaacaacaaataaggacaaaattttgttctttaggagaattgataaatcccttgctatatttatcaaggaaaaaatagagaaggcacacattaccaacatcagaaatacaaagggacatcacaatggatgctacagatagtattaggttgctgcaaaagtaatggcagttttgcccattaacctaataaaaggaaaaataaaaggatattatgagtaactttattctaataaattggrcaacataaatgaacaaattccttgaaaaacacaaattatcacaattgacacaagaagaaaaagaaaatctgaatagttccatactttttttttttttttctgcaacatagtcttgctttgtcgcccaggctggagtgcagtggcgcaatctcgtctcactgcaacctctgcctcccgggttcaagcaattctcctgcctcagcctcctgagtagctgggattacaggcgctcaccaccatgcccagctaatttttgtatttttagtagagacggggtttcatcatgttggccaggctggtcttgaactcctgaccttgtgatctgcctgcctcggcctcccaaagtgctgggattacaggtatgagtcactgtgcccagccaacttttatttcttttttgagactgagttttgctcttgttgcccaggctggagtgcaatggtgcaatctygactcactgcaacctccgcctcccgggttcaagtgattctcctgcctcagcctcccaagtagctgggattaaaggcagcaccaccacgcctggctaattttgtatttttttttagtagagacatgtttcaccatgttggccaggtcagtcttgaactcctgacctcaggtgattcaccagcctcggcttccccaagtgctgaaccttgatatgaaaatttggtgaagatattacaaaaaaagaaaattataaatcaatatcccagctggacgcaatggctcacacctgcaatcccagcagtttgggaggccgaggcgggcagatcatctgaggtctggagttcgagaccagcctggcctacatggtgaaaccctgtctctactaaaaaatacaaaaattagccaggcgttgtggtgcacacctgtatcccagctacttgggaggctaaggcaggagaatcacttgaacccggagacggagactgcagtgagccgagatcgcaccactgcactccaggctcggcaatagagtgagagtctgtctcaataaataaataaacaaacaaaccaatatccctcatgaacacagatgcaaaaatctgcatatctgttaatgctgcagtttcatttctaggagtttatcctaaggcactcttagagctgtataaagattaagagtctgtttatcaagaagagtcatatgattttttttaaaaaaagatcctgtttctacaaaaaataaataaaaattagccaggcatggtggctccagcttatagttccagctactcagcgggctgaagtgggaagatcacttgagccaggagttggaggctgacgtgtaccactgcactccagcctgagggagagacagtgaccccatctcaagaaaaaaaaagaaaaaagatgaactataggatagctaggatatttaccacagcattattttaatagtaaaaatgggaaacaaatgttccccaaaatgtgaccagttaaataaatatggtacatttatatgctagaatacaaagccattaaaataaggtagaaatatttgaaacaggaaaattcacgatatattgtttattttcttatttgttttttgagacagagtcttgctctgttgcccagactggagtgcagtggcgcgatctcagctcactgcaagctctgcttcccgggttcacgccattctcctgcctcagcctcctgagtagctgggactacaggcgcccgccaaccaagcccggctaattttttgtatttttggtagagacggggtttcaccgtgttagcctggatggtcttgatctcctgacctcgtgatccgcccgcctcggcctcccaaagtgttgggattacaggcgtgagccaccgcgcccagccaatatattgtttattttcaaggtagattaccaaacagtattatgcaatgaccccacatttttcaaagaaaaatatgtattgatatttatatgtaagggaaaaaaagactagaaggacattaaccaaatgtcaaaagtggttaattattggatgatgagagtgtgggtgacttttatttccttcctttacttataggtatgtcttacaacaaatacatattgctttttttttaagagaggatcttgctctttcaccacacctgaggtgcagtggaaccaccacggctcactgcagttttgaccacccaggctcaagctatcctccccacctcagcctcccaagtagctgggaccacaggtgcgtgctaccatacctggctaatttttacaatcttctgtagagatgaagtctctatattgcccaggctggtctggaactcctgagttcaagtgatcttcccgcctcagcttcccaaattactgagattacaggcgtgtccaggagcttttctaatacaaaagttattactgagaataactttaaaaaaaaaatctgtcggccgggcgcggtggctcacgcctgtaatcccagcactttgggaggccgaggcgggcggatcacgaggtcaggagattgagaccatcctggataacaaggtgaaatcccgtttctactaaaaatacaaaaaaattacccgggcgtgcttgcaggtgcctgtagtcccagctactcgggaggctgaggcgggagaatggcctgaacccgggagaagagcttgcagtgagccgagatagcgtcaccgcactccagcctgggcgacagagtgagactccgtctcaaaaaaaaaaaaaaagaaatctgtccagtggagatttttgtacccctcccatcacatttcttaggaagaaaatatctggggctgtgagatgttccattttaccctcaacctcaactatacccaccctgaaccactggatacaattttctctcactgggtgcacggtgcttctgtcctaatggtccaaccttctcagtaggtgaggcagtatgagctttgccactcacctactgtgtggcttttggcaagatccttcccttagttgggctccagttttttcttctctataaattcaggagctagaatcaatgatctgcaaggtcctttctggatgtagcgaaaaggagacatttagaatcagaaaacgccaggggtagatttcagaatgtgggcattacctcccagcaaaatattctttactattctcctgtgtaaggcctctagccctggcttggctccgtatctcacaccagtcatggtgtagggctgggcacagggtaggtgctcagtgatttagctttttgtctccatctcctaaaaaacaattccaaatattytaggtttgattttcagcggaccctcctgatgggtatctggagcacgaggttggttttttttttttttttggagatggagttttgctcgtcgcccaggctggagtgcaatggcgtgctctcggctcactgcaacctctgcctcctgggttccagcgattctcctgcctcagcctccccagtagctgggtttacaggaacctgccaccactctcggctatttttttttttttttttgagacgcattcttgctgttgcctaggctggagtgaactggcgtgatctcggctcacggcaacctccgcctcccggattcaagcgattctcctgcctcagcctcccgagtagctgggactacaggcgcctgccaccatgcccgggtaatttttgtatatttagtacagaaggggtttcactgtgttggccaggctggtctcgaattcctgacctcgtgatccgcctgccttggcctcccaaagtgctgggattacaggcgtgagtgaccgtgcccggcctaatttttgtatttttagtagagatggggtttcaccatgttggccaggctggtctcgaactcttgacctcaggtgatgcgccagcctcagcctcccaaagtgctgagattacaggggtgagtcaccgcgcccagccgttggttttaactatttggggcacacactgtgattttttttctgacgcagctggtacagtgcttgcttgtaacaatttgcaattcactaagctgagcagagtctggacacctcgaaggcacacatacatgccagtggctgagaacacaacattcaaatcctctccatctggggccttggtccggaaggccaatctcactgcaacccgagcggctatgagacatctccctcgtggcaggtgcccgagctgtagccacgcggcctctggaaagagatgtgctaagtcccaggacttcagaagagctctgtgaccttggccaagtcccttcctccttcaggagcgctgcagtgggcctaagtgcctcctcccgggactagtacggggacggtcgtgagatctggacaacattcgccttttaatatttattgatcttttgtgacacgcgcgtgggtttccatcagcaatgaagtcaacggtcgcggcgctggagcctgcagaactcgcgctctagatctcgcgagatctccgcccagggcttcgcagcgtcacgccctccggggccgtggcggcgacggcggtgcgtagcttactcacaggggcggcccgtatccctccgccgccggcgcggctcggccctccctcccctggcccgccaatccccgcgcctcccgacctgcccctcggtcgggcccaccccgtgctccgacggccccaccccggcggcgcagcccgcccgcccgcgcgtccctcggtccacctgcagcagggaggaagacaggcaatccctccggctgtccgaccaagagaggccggccgagcccgaggcttgggcttttgctttctggcggagggatctgcggcggtttaggaggcggcgctgatcctgggaggaagaggcagctacggcggcggcggcggtggcggctagggcggcggcgaataaaggggccgccgccgggtgatgcggtgaccgctgcggcaggcccaggagctgagtgggccccggccctcagcccgtcccgccggacccgctttcctcaactctccatcttctcctgccgaccgagatcgccgaggcggcctcaggctccctagccccttccccgtcccttccccgcccccgtccccgccccgggggccgccgccacccgcctcccaccatggctctgaagagaatccacaaggtaagcggccggaggtcggctgcgctgctggccagctgagcaggctgcggcctgcacttcccgccgtagtctccgtcgggctcgcggcctccttggatcttgctgccggtgctggcccctcggggcggcctccataccccactcccagtgatggcgcccgtggaggccccggcgcgcagcccgcgcttaggccggaggtgctctcgcggcctcagcgttcctccccggctgcccttccaggcccgcatggtgtggactcttagggcttctctccagtctgggactgccgctgcacttgagggccattgtcgggccaggatggcggggttggggccgaggggggcgctggggcgttgggcggccccttcgacagaggtcgaaagggcttctcgccccatttctgttccctcctcccacacctgccctagctccctccacaaaaccgcctgagctcgggctgacagaggaagccgttttgcccgatccacaagtatatcctgagttcacttacctcttgggtggcagcacacatcggtccaccctgcttgtccagaaactgttaagagttggaagttcagaagaaaaaaaaaaggtgacttaatgagggaggagggaagtagagggagaatcattttattccttgaggttgctgtatgtagttagaaactaacacttccgttttgcaggattggatctaatagaaaagctgtacattggcaaaggtagaggtagaaacctgaacattgaaaaccaccagagaaattatacaaaagttcctttcacagcctcttcgcaaaatggacttgacgctattaggtgatatgtttaccgagactcttaactgggaaggggttttactagattttgtattaaaaaggatttctttgctctttaaagtgaagggttatttagttatcaataaggaggttttcctaataatacatctagrctataagattggcttaaaatttattttttttccctttctgatgttgtaacctcttagtgccactttcatgttttttttcttagaagtagggaggcaccactattaatttctgtttggtgtttcacttggctactcagattggctatattaaaccggtagctacttttttcttcaatacatctttttccttttagtggagaacggggtcttgccgtgttgtccaggctggtgtggaactcctgggctcaagctagcctcctgtctctgcctcccttaagtgttggaattacaggcatcaatcagccactgcacacggcctatacctgtagctacttagaagtaggtactggggttatccattctgaatgatgggatgggratgcaagaggaagagaaccagtttttagcttgtcttaaactaagtcagaatacagattgatgatttaaacacctcagctcagcggttggtcctcatttcatttttgctcaaagacagtgtggaatcagtcccattggttactataattaggttagctccttaacttcttttgactctgatttctaacaaatgaagaagggcagattttagacaataaatcttgtactaaaatgaaatggtatttgttaaataccataaagaagcttgaaccttaagcaaagatgtcttaaagaaccgtttaaggggcaggggagcacactgaggagtagtcatccaaaaaaaatatatacatatgtattttaaaggcttttaggaattgctaggtccttatagaatctaactgggaagttatcaaatacctgtagaagcttgtcctcttattttataacctgagaaagagcaagtgggtataatgtgtaataatttacagataaagaaatgtagacctgccgggcgcggtggctcacgcctgtaatcccagcactttgggaggctgaggtgggtggatcacgagatcaggagatcgaggccatcctggctaacacggtgaaaccccgtctctgctaaaatatacaaaaaaaactagccgggcttggtggcgggttcctgtagtcccagctactctggaggctgaggcaggagaatgacgtgaaccggggaggcggagcttgcagtgagccgagatcgcgccactgcactccagcctgggccacaggcgagactccctttcaaaaaaaaaagaaatgtagactttaatctctacattgaattatatgtgtaacggactttttcagagagggaactatctctttgacacaaaacatacgttttaattaataatacttgctctggtaatatagtttcttatgagttgctacatattttctagaatagattttccytaaaatatgcctttgtaagatttttttaataaaatcaagtttagaaataatttgaacttttttgggggatagagtttcagtcttgtcgcccaggctggaatgcaatggcacgatctcagctcaccgcaacctccacctcctgggttcaagtgatttttctgcttcagcctcccgagtagctgggattacaggcacgcaccaccacacctgtctaatttttgtrtttttagtagaaacggggtttcaccatgttggccaggctgatttctagttcctgacctccggtgatccacctgcctcagcctcccaaagtgttgggattataggcgtgagctaccgtgcccggcctgaacttttttttttttggagacggagtctccctctgtcgcccaggctggagtgcagtggtgctatcctggctcactgcaacttccgcttcctgggttcaagcgattctcctgcctcagcctccggagtagctgggattacaggcactccgccgccatgcccagctaatttttgtatttttagtagagacgggatttcaccatgttggccaggctggtcttgaactcctgacctcaagtgttctgccaccttggcctcccaaagtgctgggattgcagatgtgagccacgtcatctggcctggcctgaacttttagaattcaatattaaccattttcccctagtttattccctagagctcttcacaaagtatggcttgacttctctgagacagcyagtgataagaaaaatgaagtttattttggtataccactcaaaaagattgtgaaaacaaaatggagattaattttttttttccaaactctttgtaccacaattttaagttgaatagctgacttcctaggcatggataagatcagttctatcttatcttctgtcctagtaatgtgtctgcagtggaatccccattgcttggcttctataattgatcttgaaccttcccaattatcattccctgaaaaaataattctacttaaataccttcttgacttaaatgtcatgagttgytacatctgggttctgataagatttttctaagaaaaactacatttgacatgtgacatcttcaggaattcaatatcttgtttctttgacagagggacgctattcatgtctgtgaatttggcagtctttgaaatgccatgtcttttttggaaaaagcttttgatggactttattttgatatacatcttaaggtcccctgacctatactataagcagagcatagcaaagagggtcattatgaacattgtgtgtagttctgggcagggcttgggatcctttgggattgttggtatctacaccacatggccccaccctgctatgttttaaggttttctgctgactttttaggtcttcagccttgattttgatgctttgagtgcctgcctctagcagcaccacccccagcccttttccagttggctgcatctcatctgttgtgggctaagaaaccagatcacagagcttattaaaattgtgtctaaaataagatccagtaggctcttgactgaagagggcttcatgtgctctgtgaactgtgtggtttccttggctgatcggagacctttctgacttgcttcctgtttttcttctttacttttgctatacagatgtaggaggctttttggtgctcttagagtgctgtaatgttgaagtatttggttaatttctctattcttgggaagggtaaaaggctaaataaatatcttgattctttgaggagttgaagactgaccagagttggatactaaaagcttttcttaacagtaatagtgcattgtacattttaatggtgtcctactagttgcagataacgtttggcatacatagctttcaaacaaagtaatgccaggattatcacttgatctatttctgtgatagagattttttttctttctttttttttttttttgaggcagtcttgctcaggctggagtgcagtgtcatgatcttggctcactacaaactctggctcccagggtcaagcagttctcttgcctcagactcccaagtagctgggattacaggcactcaccaccatgcccagctaatttttgtatttttaatagagacagggtttctccctgttggccaggctggtcttgaactcctgacgtcaggagatccgtccgtctcggcctcccaaagtgttgggattacaggtgtaagccactgtgcccggcctatggctagcttcttttaaggcgtctcaagacaaagttctcaatgaaataaagatttcaggtcatgcacagtgggtcacgcctgtaatcccagcactttgggaggcccaggtgggcagatcgcttgagctcaggagttcgagaccagcctgagcaacatgacgaaacatggtctttacaaaaaatacaaaaaattagctgggtatggtggtggatggctgtagtcccagctaggtgggaggctgaggtgggaggatctcgggagcctgggaggtagaggctgcagtgaaccgtgatcaagccgctacactccagcctatgcaacagagtgagaccctgtctcaaacaaacaaacaaacaaaaagatttcaaactctgatgtctataaaagccaggcaggtaccaaagtgagcagagagaacttgagggagctagaaaatgcatgtgctatcagatgagggcaactgctaaccagctccctgcaaatgttgctattgctaaaatctgtgggcccagtgttgcaatatcttccattcaaaaaaaaaagagaagccacaaatccagattttttggcaaccgattcaacttaaaaaaaaaaaraacaacaaaatacgcatttttggtcgacatcagtttagtatgtggattaaagtaaccagggattggggttcattaagtaatcaggagtgtaaaaagattaagtcatttaaacaatactttctgtatttttaaaagtttgaaagtaatgctttatgtaagattaagttttcttgtttgtttgtttttgagatggagtcttgctctgtcgcccaggctggagtgcagtggcatgatctcggctcactgcaacctccgcctcccaggttcaagcaattctcctgcgtcagcctcccgagcagctgagactacaagctcgcaccaccacgcccagctaatttttgtatttttggtagagacggggtttcaccatattggccaggctggtctcgaactcctgaccttgtgatccacctgcttcggcctcccaaagtgctgggaatacaagcatgagacaccgtgcccggccttaagtagtttttaaatacaattctaattaacttgctttttttttttgagacctcaggtgatttgcccgccttggcctcccagagtgctgggattacagggatgagccactgcacccagccaatttgctaagkttttttttttttttttttttttgagatagagtctcgctctgttgcccaggctggagtgcagtggcacaatctcggctcactgcaagctctgcctcctgggttcacgccattctcctgcctcagtctcccgagtagctgggactacaggcatgcacccccatgcccagctactttttgtattttcagtagagacggggtttcaccatgttggccaagctggtctcaaactcctgacctccagtgatccacccgcctcgacctcccaaagtgctgggattacaggcgtgagccactgtgccccgccttttgtatggttttgtgtgaggtcttgggaaaaccagttttgtaaatacattgatcccgtagaagtttatgtattactcttccattatgatctgtttcatgttttgagtttctctgtagactgacaatacactttgaaaatgtctgagattgggaagttaccgaagcatgatcttaaagaaagtagttgtaacgctgaacagtactgtattttaaaaaattgcttaggctgggtgcggtggctyatgcctgtaatcccccagtactttgggaggctgaggcgggccgaccacctgaggtcaggagttcgagaccagcctgcccaatatggtgaaacccygtctctactaaaaatacaaaaattagccaggtgtggtggcactcacctgtaatcccagctactcaggaggctgaggcaggagagttgcttgaacctgggaggcagaggttgcagtgagccaagatctcgccactgcactccagcctttgcaacagcgagactccatctcaaaaaaaaaaaaattgcttaaaaatactgtaggccgggctgggcgctgtggctcatgcctgtaatcccagcactttgggaggccaagacaggtggatcacaaggtcaggaaatcgagaccatcctggctaacacggtgaaaccccatctctactaaaaatacaaaaaattagtcagtgtggtggcaggtgcctgtagtcccagctattcgggagactgaggcaggagaatggcgtgaaccgggaggcagagcttgcagtaagtggagatcgcgccgctgcattctagcctgggcgacagagcgaaactctgtctagaaaaagaaaaaaatgaaaataaaaaatactgtaggccgggcgcggtgactcacgcctgtaatcccagcattttgggatgccgaggtgagtggatcacgaggtcaggagttcaataccagcctagtcaagatggtgaaaccctgtctctactaaaaatataaaaattagccgggcatggtggtgagcacctgtgatcccagttactggggaggctaaggcagagagttgcttgaacccgggaggtggaggttgtggtgagctgagatcgcaccactgcagtccagcttgggcaacagagcaagactccgtctcaaaaaagaaaaaaaaatactgtactagaggtgtggtaccatatattagattaatattagaggtaaggactgattgaattcctatcaaaatgatgaattaacaggtagtcctgtggagtattgggaactttaataaatggttgtctgaatatggctatttaaattagttctatcttggatagttctatcttggataccttcttactccaaaaggtgagcttcttcacataagttctgggaatttttttttccccactaaaaaagtattttttatttcctttacaaaagatcattgaattaaggcactttctttggctctactagattgttatttaaatataattcaaacagccatcgaggataactgttaataaatctaggttttctctgaagtctcccagtgtatattactgtactgatgactgacaaggaagaggttttgacaaggtccaattctgtatatttctcttaaaatatcctaggcagttcccaggataggagtatctgactcatgcctcatgctaccaggaacctttgcagcctcatcccagaaatgcagaaacacacttgttttgtctgtagaaataaagttttgatggttagatttccaggcaaaccttcaaaatcatgttaaactataatatagggaaataaagtagtgtttgttcttctgtctgcagagtcaagtgagattttgggtaatagaatcataaaatgttagcactgcagcacatctcagggctgctgtctggaaaggccgtgtgacctaccaggtaagagtaggtctgaattgagaacctggatttctkgactgtccagtgtattttctggcaagccatgygttatccttacatagctgttaggtatataaatccagaggatgcagccttttttcttttgttcaaacaattggatatttaaactgtgtcctggaacctgaagatcttcctcaacttccctttatatgattggcaaggttgctcatactgcttgaaactgcaaatttmggcttgacacagtggctcatgcctgtaatcccaacactgggaggccaaggtgggaggattgcttgtacctaggagttcaagaccagcttggtctgtaatgggagaccctgtctctacaaaagcgaaacaaagtgaaacaaaattagctgggcatggtgatgtgtgcctgtagtcctagctactcaggaggctgagacaggaggatcacttgagcctggatgaaaggttaaggctacggtgagctgtgatcataccactgcactccagcctgggcagcagagccagattctgtgtcaaaacaacaacaacaacaacaaaacaactattgcaaatttggtgttctattctcaccaccaccaccaccccgcctttttttcccccgaaacggagtctctacctctgtcgcccaggctgaagtgcagttgtgcaatctcggctcaccgcaacctctgcctcccaggttcaagagattctcctgcctcagcctcccaagttgctgggaccacaggtgcatgccaccacgcccggctaatttttgttttttgtttttatttgagatggagtctagctctgacgcccaggctggagtgcagttgtgtgatctcggctcactgcaacctctgcctcctgagttcaagcaattctccagcttcagcctccagagtagctgagactacaggcgcgtgccatgatgcccagctaattttttgtatttttagtagagatggggtctcactatgttagccaggatggtctcgatctcctgacctcgtgatccacccacctcggctggtttggaactcctgacctcaagtgatccacctgccttggcctcccaaagtgttgggattacaggcatgagccaccacccccggctttctgcatatatctttcatcagagtcaaatggattttgttttttaagtgaaagcaagtttattaggaaagtaaaggaataaagaatggctactccctaggcagagcagcctcaaatgggtttttaatctctaaaaagactaaaaaccactgtccttccaccttaaacattattttaatctcagcagatgaacagagtacctgttctgcagagaaaatataaatcttacgtgtgagttgttagggatttccttcaaggtattaaaacaacagatcggctgggcgcggtggctcatgcctgtaatcccagcactttgggaggccgaggcgggtggatcgtgaggtcaggagatcgagaccatcctggccaacatggtgaaaccccatctctactaaaaatacaaaaattagccaggcacagtggtgggcacctgtaatcccagctacttgggaggctgaggcaggagaatcacttgaacccaagaggcggaggttgcagtgtgccgaggtcgtgccactgtactctagtctgggcgacagagcaagactccctctcaaaaaaaaaaaaaaaaacaaacacagatttcagctatccactttagagtactcactgtgcatcaggaattacttgatcttttcaataatctttcaataattctgttctccccaggttagataaggaaacagtgggagaaataaacttgcctaacattatatggttatggtaggaagaactaggattcagatacaggcgatcttgactgtagagctattgtgtctccagatttacttgttttagtcatagcccttctcccctctaatctctagagaagctttacttttccctttgccaaacttaacttttgctttccatccttttctctctctctctttccctctttccttccttctctccctccctccctcacttcctccttccctyactcacttcctccctccttccttcctttttccttttcttgtttttgctctccggtaattgtctttgttttcatacttccaatctcttctccactaactcctcttagcatccaaacttatcgaaggttttcccctataaaaaaaaaaaaagcagtaaaataactttttaaacttccctcttccataagagctacttccttcctcatctttatccttcccatctctgacatttcagtcccagaattcttgaaagaatagtctattcactgttctggaactatttagtaaggtcactaatgattacttaattgccacattcagtggatacctaagtttttatttaactttcgtaatagttgacatgattttcattcagttcctttggcttctgataaactgctttcttcttcctcatatctggtgtttcccaactttattagaatgcttatcaaagtagtattgttgatggagtacaagccaaagtgtatgaaatcatgcatacttgtattaaaattgagagcactggctggatatggtggctcatgcctgtaatcccagcactttgggaagccaaggcaggaggatcacttgagctcaggagttcaataccagcctgtgcaatatagcaagaccctgtgtctacaaaaaattaaattagctaggtgcagtggcatgtgcctgtaatccctgctactcaaaaggccaagacaggaggatcgcttgagcccaggagtttaaggctgcagtgagctgtgatcatgccagtgcactccagcttgggccacagagcgagatctgtctcttaaaaaaaaaaattgacagcacaaattacctcagataaattaattattattcttttttttttttttttgagacagagacttgctctgttgcccaggctgtagtgcaatggcgtgatctcagctcactgcaacctccgcctctcaggcccaagcaattctcctgcctcagcctcccaagaaaagaagctgggattacaggcatgcaccaccgtgcctggctgatttttgtatttttagcaggtttcaccatgttgaccaggctggtcttgaactcctggcctcaagtgatccacccgcctaagcctttcaatgtgctgggattgcaggtgtgagccaccatgccccacctgatctcagataaattaattaaaatatataatcaaaataatgtcacaaacagaattattaagaattatcaagatgaggctgggcgcggtggctcatgcctgtaatcccagctctttgggaggccgagacgggcagatcatgaggtcaggagatcgagaccatcctggctaacatggtgaaaccccatctccactaaaaatacaaaaaaattagccagacgtggtggtgggcacctgtagtcccagctactcaggaggctgaggcaggacaatggcgtgaacctgggaggcggaacttgcagtgagccgagatcgcaccactgtactccagcctggacgacagagcgaaactccatctcaaaaaaaaaaagaaaaaaaaaaaagtactatcaagatgaaacatctgtcattcttattttgctatcagttttaagaatagtatttttcttacataataaaagtcatcctcatcaggtactcctttaaatgtcttactgtatattgttttcattgcagtataatatgaaaatttgtttccaacagatacattgtagcaaaagaaagaatacagactgcatattttgcagttaggctgctgctgacattattaattatcccatcatggataggtcaccctaatttttctgaaaaatgcctgttctttgcttgtgtttattttgaaataatacgactacttgggcttaggaatcaaaggactctgctttccatttaaaatgtctttctcggccgggcgcagtggctcaagcttgtaatcccagcactttgggaggctgaggcgggcgaatcacgaggtcaagagatcgagaccatcctggctaacacggggaaaccccatctccactaaaaatacaaaaaaaattagccaggtgtggtggcgggtgcctgtaatcccagctacttgagaggctgaggcaggagaatggcttgaactcgggaagcggagcttgcagtgagctgagatcacgccactgcgctccagcctgggcgacagagcgagactgtctctaaataaataaataaataaataataaaaaatgtctytctcctagatataagtcaattgggaatgagtacacttgaaatatttaatatataataagcttcgattaaataacttctctcttttttttttttgagacgaagtttcgttcttgttgcccaggctggagtgctatggcgtggtggtgggggcctgtaatcccagccactcaggaggctgagtcaggagaattgcttgaacctgggaggcggaggttgcagtgagctgagattgcacactgcactccagcctgggcaacgagagtgaaactctgtctcaaaaaaaaaaaaaaaagtaaaatttagaagaaaaatattactgtctttattactataatacatattagtaattagtatctcctggggaatgctgctgtagttgtaacgcttgtagttggtccttcctagaatcatgttctccggtctttgttcagtgcctttgcttatacagagaatctcttctcaccccatcccctacctcctaaattctttattcatacttggggacccagcagaaatggcttctctaggaagcatgcatgaggcatacaggcagtcagagttcaactgtagaatcgtttcttagtgtgtagacatgattgattattcccctatttagactgaactctcctgggcaaagttcttgtcttattcttcgtattcctagtacctaaagcatggtattctgtgtttgccaacaacattcagtgaatgccaatatcaggtggggtggcaaaaaaaaaaaaaaaaaagaaaagaaaaggtggaattttggagcatttgtggccttaggcaagtcactttgcgaattttcctgagcctcagcttccttgtctgtagaatgggaattgtaccctgcaagcctgtggggaagattagatagaagagggtttagcattttggactacataaaagataattttgttgttattttttacaaatgtgcttggcagttttattcacagtacccgatacttagaaacaactcagatatccatcattagctgaatatgtaaacaaaatgtagaaaatccatatactggatggagcattacccaccaataaaaaggaacaaatagtgaaacaaccctgccacttagcagtttattagttggctccaagttcaccctcccgtacttgctctgctttgactaaataacttctgaagtatgtatttcagctggtgaagagctggactctttcacctttgcagtgaacaacatgttgggctttgtcaatagagggcactagagggacattacagaggaaaggggcttcttagatttggtggacttttctttttttaagtttttaaatattatcatggtgtcttaacatgccaataatgttgacctacggaattggtataatctcaaaatcttaggtgtcagtgttaaatatatgtttcacttttacttcatcgtcaccccaagcaaaaaaagaaaaacctgaatgtgaaaagaatgaagtcttataatatttctaaactaaaaaagggattgaatcccagtattcttcagcaaacttcaaaatactgtcaccttaatatgtttttaatacatgtgatatttttgtaggtctagaattgtgaaatcaattctcttaaacatcttattatagaagtgtctgctgctatcctttgagcactaaccccaccacctgtaatgcatcatgccaatataagtgatagaattgctttgctaaattcttaagggcttatgtcagggaaaaactttgaaattagctgggtacagtggctcatgcctataatctcagtgctttgggaggccaaggtgggagaatcacttggctgggagaccagcctgagcaattcagcaagaccccttctctacaaaaactgcaaaacttagccaggtttggtggcacacgcctgtagtcatagctactgggaagactgaggtggaagaggaggatctcttgaggcccagagttcaaggcggcagtgagctataatctgcactgcactccagcctaggtgacagagcgagatcctgactcaaaacaagacaagccttgaaatcaaagttgatttttacaaaagcctcaatggtaggagttttagatttcttaaaataatagcacactaatggagtgcgtgattttctttagattaaatgtttacatatttataccatctgtattagtttcctagggttgccataataaattaccacaaaccgggtggcttaaagtaacagaactatattctctcacagttctggaggccagcagtctaaagtcagtctgtcttcaggtccatactctggatgttctaggggagaatccttccttgcctcttccaactttggtggatgtcagcattccttggctcctttggtttgtggctacatcactccagcatctgcctccatctttgtatcaccttctctgtgtgtgtcttctcttttgtgtcttatatggccacttgtcattaaacttgcccatccacgtaacccaaagatgatttttttttttgagacggactacagacacgtgccaccacgcccggcaaattttttgttttttagtagagwtggggtttcacgttgttagccaggatggtctcaatctcctgacctcgtgatctgcccgcctcagccttccaaagtgctgggattacaggtatgagccacygcgcccagccagtaaattctttttattactgtagtagatgatacttgattaaatgccatctcgggtgctttcattgtcaacaaaggtgctcccatctytaagcttacataaaatgtaattttaaaaagacatttctttagatgtacctgttcacatttttgttaatagtctctcatgtctagttttggaggctggaatgttcaagggagccacaaaaatctctgtcagttggtgttttgaataattgttctgaaatatactcccaggcttgaaacttggatctggccttttttttttttttttaacttgaatttttttttttttttttgctcttatgttattcatatgaattttgcaaatagagagccagtcttgtagcatagtaaaatttaacagtttatgtgactattgatctacccatcttatagagattgtctgtctgtaggaagacggtggtaaccgtggtcagactcatcattttgaacactctaggttagtgttggagaatttgtaaaacagaaacttaaccacctgtgctttgaaagagtaaagtccatgaaaagtattacttttaagtttcaaggatttacagttttaggttaacagtttttacatattgtatttcaaaacatcagagtactgaaacttacctgtatgcttcttactaaaaatagttcatgcaggttcttttgggtgatcatagttttacagagtatagtagaaaacaggatgccagttagcatctctcttttttttttttttttttttttttgagatgggagtttcactcttgttgcccaggctggagtgcaatggggtgatctcggctcactgcaatctccgcctcccgggttcaagcaattctcctctcacatcctctcgagtagctaggattacaggtgcatgccaccacgtctggctaattattgtatttttagtaaagatggggtttcattatattggtcaggctggtctcgaactcctgacctcaggtgatctacctgccttggcctcccaaagtgctgggattacaggcatgagccactgcactggctcctggccagccagttggcatctctttaaggtctccactatccacctatattaagtagcacagaaacacaccaagttaatgatactagcattcatctccccccaccaccacattttctcaagcttcgtactgcggtacatgtgtgattagtgttacagaagagggtgtcagtaacccagcaaataagttctttaggtttctggtttgctatgtagttactaaggagggattcagctggtggaggagatccttgcgcaaatgccaggaaggaagcccttttcctcgcatttcagtgtttcctttgaagcctagtgagggtgaagtcttttggcataggtgctccaccatctgtctattcacatagactcttcccatctacctggctatgtgccacccttgttgtggacatagagtgggtagagagcagagaccactgcttcagtaactaaaaatagatggaatttcagatcctgacagagattctctgtggagtcgctaccactgctcctcatctcctggagttagttgcaaggaacagctgtttgtctgatctgcttttggtactatgtatacttcctaatacttttgttcccctacttgctatagaagtagaagtagttttactggaatacctacgattttcctgtcctgtctctctcattcacttagttattttctgccttggctctggttgccaaaattctaaacttctgttttgtgttttgtgtgtgtgtgtgtgtgtgtgtgtgtgtgtgtgttttgacagggtcttgctctgttgyccaggctagactgcagtggcacaatcacggctcactgcagccttgaccctctgggcttaagtgatcctcccacctcagccttyccagtagctgggacagcaggtgtgtgctaccatacctggctttttaaaaaaatttttgtagagatagggtcttgctgtgtggcccaggctgctctcaaactcctgtattcaagtgatcctcctgccccagcttcctaaagtgctggaattacagacagccaccccactctgctaaacttctgttttgttaggtatatgatcccatggctgcagtatcagagaatgaggttattgcctttccatgtaccttatttcgttgactctgaaacacatcaattgaaagatgtaccattattctactaagaaggaaagtatatttagtgccaattaagctgacatgccattgattatatgcagcttgatttcagctatgttttatttttgtttatttatttatttatttatttttgagacgaagtctcactctgttgcccaggctggagtgtagtggcacaatctcagctcactgcaacctctgcctcccaggttcaagtgattctcctgcctcagcctcctgggtagcttgaattacaggtgtgtgccaccacacccagctaatttttgtattttaattttttaaatttttttgagatggagttacgcttttgttgcccaggctggagtgcaatggtgcgatcttggctcgctgcaacctctgcctccccggttcaagcaattctcctgcctcagcatcttgagaagctgggattacaggcatgcgccaccacacccggtttattttgtatttttagtagagatggggtttctccatgttggtcaggctggtctcgaactcccgacctcaggtgatccacctgccttggcctcccaaagtgctgtgattacaggcgtgaaccactgtgcctggcctaatttttgtatttttagtagagatggggttttgtcttgctagcaaggctaggctggtttgggaactcctgacctcaagatgatccgcccaccttggcctcccaaagtgctgggattacaggcatgaacaactgtgtccagcctcagctatgttttttttaaaaagtcttacaatcagtgacagtcactgtaattgtaactatctggttcttcaacagatatttactgggcagttttcatggaccaggcactgtgcaaaaagctggaagtcaggtccctatttgttactgggtcaagagacattaaataatcacatagatgttgggcgcggtggctcacatctgtaatcccagcactttggaaggccgcggtgggcagatcacgaggtcaggagttcgagaccagcctggccaacatggtgaaaccctgtctctactaaagatacaaaaaattagccgggcatggtggcacgcgcctgtaatcccagctactcgggaggctgaggcaggagaattgcttgaacctgggaggcagagttgcagtgagctgagatcatgccgttgcacacctgcctgggcaacagagcgagactccctctcaaaaaaaaaaaaaaaagttgttcccatagataaggctcatgtctgtaatcttagtacttttttttgagacagagtctcactcttgtcacccagcattgagtgcaatggagcaaccatagcttactgcagcctcaacttcctgggctcaggtgattctccaggcatgtaccatcatgcccagctaattttttgtatttttattagaggtggggttacatcatgttgcccaggctggtctcgaactcccgggctcaagtgttacgcccacctcagccttccaaagtgctgagattacagtcgtgagtcaccctgcctggccaatcctatcattttgaatggctgaggagagwggatggcttgagtccaggagtataaggccagctgggacagcgtaacagagtgagaccctgtttctacaaatttttttcttttttgaaacggagtctcgctgcgtgacccaggctggagtgcagtggcgcgatctcggcttactgcaacctccgcctcccgggtttaagcaattctcctgcctctgggaccacaggcatgtgccaccacacccggctaatttcttgtatttttagtagagacggagtttcaccatgttagccagatgatctcgatctcctgacgtcatgatccacccatctcagcctcccaaagtgctgggattacaggcgtgagccaccgtgcccagccactacaaaatattttttaaaataagcaacacccaggtgtggtggcatgtgctggtagtctcagctcactcgggatgctaaggcagtattgcatgagcgtagtttaaggtttcagtgagctatgattcacaccactgttctccagcctgagcgacagagtgagactctgtctcaaataataataatcacacagacaaataggaactgtataaagttgttaaagcaacctgggctttaccgtagtacttaataagaaataaattgaaatggcggaaaagggcttctgggaaggtctctaagggcaatatttaagtgaagcctgaaggtggatgtgggggaggagaggatgggaagaatattctaggcagagtgttcctatagtcctggagtggttgaaatttaaaagttaattaagaaaaagtagactgggcgtggtggctcacgcctgtaatcccagcactttgggaggccgaggcgggtggatcatgaggtcaggagtttgagaccagcctggccaagatggtgaaaccccatctctactaaaaataacaaaaaattagccgggtgcggtggtgagcgcctgtaatcccagctactgaggaggctgaggcaggataatcgcttgaacccaagaggcggaggttgcagtgagccgagatcacgccactgcactctagcctgggtgacagagcaagactccgtctcaaaaaaaaaaagtagaggttgagcattccttatccaaaatgcttaggacgctaagtgtttcagattttgaattttttcggattttggaatatttgcatatacataatgaaatgagatatcttggggatgggacccaagtctaaacacagaattgatttatgtttcatataggccttgcacaattttttggagcctgaacataattttatgtagtttgtttgtttgtttgtttgtttttgagatggagtctcgatccgtcacccacgctggagtgcagtggtgcagtcttggctcactgcaacctctgcctcccgagttcaagctattctcctgcctcagcctcccgagtagctgggattacaggcgcgcgccaccatgcctgggtagtttttgtatttttagtagagacggagtttcactatgttggtcaggctggtttcaaactcctgaccttgtgatctggccgccatggcctcccaaagtgctgggattgcaggcgtgagctactgtgccagctgtttttttggggttttttttkgtttttgtttttttttgaagatagagtctcactttgttgcccaggctggagtgcgatgcaatagtgtgatcatggctgatggcagtcttaaactccagtgctcaagccatcctcccaaggactgtaggcactgtggtgtacaggtgtataggcactgccgcccagctaattttgtagagacaaggcctcactatgttgtctaggctggtgttgaactcctggactcaagtcatccttctgccttggcctccaaagtgctaggattataggccttacacaattttttttttttttgagatggagttttgctctgttgcccaggccggagtgcagtggtatgatcttagctcactgcagcctctgcttcctggtttcaggtgacgtccagctaattttgtatttttagtagagacggggtttcacaatgttggccaggctggtcttggactcctgacctcaagtgatcctcccacttcggcctcccagagtgctgagattacaggcgtgagccactgtgcctggcctttacacaatattttaaataattttgttcatgaaataaaatttaacagtgttttaactgctgcctaccacatgcgaccaggtgtggaattttctacttgtggcattatgtcagcactcagaaaaactttcagatttcgaagcgatttagattcgaattttttttttttttttttttttgagacagagtcttgctctgtcgcccaggctggagtgcagtggctcaatctcggctcactgcaaactccacctcctgggttcactccattctccagcctcagcctcccaagtaggtgggactgcaggcatccgccrccacgcccagctaattttttgtagttttagtagagatggggtttcaccgtgttagccaggatggtcttgatctcctgacctcatgatctgcccgcctcggcctcccaaagtgctgggattacaggcgtgagccactgcgcccggcttttttttcttttttttttttttgaagacggcgtctcgctttgtcgcccgggctggagtgcaatggcacgatcttggctcactccatcttccgcctcttgggttccagtgattctcccgcttcagcctccctagtagctgggattacaggcatgtgccaccacacccgggtaatttttgtatttttagtagagacggggtttcaccatgttggccagactggtctcaaactcctgacctcaggtgatccacctgcctaagcctctcagagtgttgggattacaggcatgaaccattgcatccggccaataacaatgtattcttaaaaattgctgagagtagattttttaagtgttttcactaccaaaagaagtaagtatgtgaagtaaataagtatgtgaggtaatacatacgttaattagctcaatttagccattctacaatgtattcatatttccgaacaacatgttgtgcatgacaaatatatacaattttgtcaatttaaagaagttggccaggtgcagtggcttacgcctgtaatcccagaactttgggaggctgaggtgggtggatcacctgaggacaggagttcgagaccaacctggccaacaaggtgaaaccctgtctctattaaaaatacaaaaattagctgggcgtggtgtcaggtgcctgtagtctcagctactcgggaggctgagacaggagaattgcttgaacccaggaagtggaggttgcagtgagctgagatcatgccactgcactctagcctgggcgacggagcgagactccatctcgaaagaaaaagaagttgtgaaatgaacaaaggatagttaaaggtaaaataggaaaggttcttgaatgaatagagaatatggtcatatgccacataatgacattttggtcaatgacagatgatattatgacagtggtcccataagataatggagccagaaaattcctgttgcctagtgacatagctcttgtagcgcaattccttttttgaaaaagtaaattaaaaaaataataagtttattatagcctgagtgtacagtgtttataaagtctgcagtagtgtacaataatcagtaatgtcctaggccctcacattcattcattacggactcatccagagcaacttccagtcttgcagactttgttcatgatgagtgccctatagaggtgtgccatttttttacctttttttcctcatgtttttaccataccttttctgtttagatatatttaggatacacagatactattgtgttatagttgcctgcagtattcagcacagtaatatgctgtataggtttctagcctaggagcaataaggctgtataccatgtggcctaggttataccatctcggtttgtgtaagtacactttgatgttcctacagctacacatttctcagaatgtatgcctttcgttaagtttagcatgactatattctcttcataacacatttccatctcagtggttgctaaagtactcaaagaaactccttgttctctcgtgttttacacatttaccccaaaacacctttttcttttttcttttcttttcttttttttttttttttttgagacaagagtttcgctcttgttgcccagtctggagtgcagtggcgcgatctcggctcactgcatcctctgcctcctgggttccagcgattctcctgcctcagcctccctagtagctgggattacaggcatgtgccaccatacccggctaatttttgtatttttagcagagaccgggtttcaccatgttggtcaggctggtctcgaacgcctgacctcaggtgatccacctgcctcggcctcccaaagtgytgggattacaggcgtgagccaccgtgcctagcccaaaacacctttttcattcaagttcagtaattacatcataatatattgtgtatgtcactataaactaacttttttttttttttttgagacacaggttcgctcttgttgcccaggctggagtgcagtggcgcgatctcggctgactgcaacctccatctcttgggttcaagtgattatcttgcctcagcctcccatgtagctgggattacaggcatgcaccaccacgcccagctaattttgtatttttagtagagacagggcttctccatgttggttaggctggtctcgaactccgcacctcacatgatccacccacctcagcctcccaaagtgctgggattacaggtgtgagccacggtgcccggctgcgtgcaggtcttttttttttttttttgagacagagttttaccccatcccccaagatggttggagtacagtggtgagattatagctcactgcagccccaaacttctgggctcaagtaatcttactgcctcagcctcctgagtagctagtactacaggaatgtgctaccacatccccgctaatttttgttgttgttgttgttaattttttgtagagacagggtctcactttgttgaccaaactgatctcgagctcctgggctgaagcagtcctccagcctcagcctctcaaagtgctgggattatagccatgagtccctgtgcctggcctatagactttctgtttcctgccgctattggtgattgggctgaatggactagacttccttttggaaattttttatgtgcctttgtaagtatttgagcactaattctggttggtaccctactaagcattaatccactcagacatttgagtgcctctaatgttccagtctctacagaatgcagtgaagaatatgatataccttgtctctcattcaaggagtcataattaaacattaaaggggtagagaagagtttgtgcagaggttracttttggtagttgtggataaattaaaaatgaaacatagggaggctgagggaggggaatcacttgaacccgggaggtggagattgcagtgagtcgagattgtgccactgcactccagcctggcaacagagcgagactctgtctcaaaaaaaaaaaaaaaaaaaaaaaaaagaagaaagaaatacagctatatagtaccatatatgatactagatttgtatagtacagttaataaaatagcttcctaggaaaaggaggcccatagagaataaagagttaagatctttttcatcctaagaaagataagtctattctttttaattgcaaatgtttaatgttgatgttttaaaaccataactgctgttgtgaagataaagattatctggggtctagcttagaatttttttttttttttaaatctcagaatttcatatkggtttctcctttgtgaaactttaaacgtggtaggcaaattttaatgtgtaaactgcaatttatkggatataaataacttataagatggaactcactgactttaaaactgcttttcccatagctgacttttcttacttaacagtgatagaccttattctctgacttcctgattctaactaacaccctccaccccctcttcaagtgtagatctggttttgtatttaaggtcaatgatgagtctaaaaaagaattttcttaggctggacacagtggcttacgcctgtaatccccacactttgggaggccgaggcgggcggatcacgaggtcaggagatggagaccatcctggctaacatagtgaaaccctgtctctactaaaaatacaaaaaattagccgggcgtggtggtgggtgcctgtagtcccagctactcaggaggctgaggcaggagaatggcatgaacccgggaggtggagcttgcagtgagccaagatctcgccactgcactccagcctgggcgacagagcgagactccgtctcaaaaaaaaaaagaattttctttaaaatgtctatagttttttgaattatttgttttatgttagggtaatcagcatcttcttttgttaaacagaattttagtccgtttactttatcagcataaatacaatatagtgccttgtttagtttttataaaaaaatctttttagagacagagtctgttgcctaggctgaagtacagtggcactatcatagtgttaacaggggtccttgctcccagagctctcaagatggtggtgggccacttccacgatgttggcaagcctcgtgttctctgacctggggttgttggcctcatggattccaaggaatggaatcttcggccatgctgtgagtgttatatctctattagaagctgtgggtcacggaagagaaccgtagaacccagtgactagtgttccagctggataggatgaacccaggcacttagccatgcaggaacaatggcaagcctttagcccaatcgggagtggcaatgggtgcctcactggatcaggagcacagtggacaccctgctccatccggagggatggaagtcagcagcggctctgcgacagcagcaaacagtagtggtggaaagcgagcgaaagctcagctcaagccataacaaacatggatgaggccgtggtggctcacgcctgtattcccagcactttgggaggccgagatgggcagatcacgaggtcaggagattgagaccatcctggctaagatggcgaaaccccgtctctactaaaaataaaaaaaatagccgggcgtggtggcgggcaccaccagcaacttgggaggctgaggcaggagaatggcatgaacttgggaggcggagcttgcagtgagccaaggtcgcgccactgcactccagcctggccgacagagcaagaccccatctcaaaaaaaaaaaaaaaaaaaaaacggaccagaagagtgcggttgcaagatttaatagagtgaaatagagtgaaaacagagctcccatacaaagggaggggacccaaagagggtagccattgccagctcaaatgcctgggtttatatccagatcattgtccctcctgctgtgctctcaggcagtagatgattagctatttctttacctcctgtttttgcctaattagcattttagtgagctctctgattggtygggtattagctaagttgcgagccccgtatttaaaggtggacgcggtcaccttcccagctaggcttagggattcttggtctaggaaatccagctagtcctgtctctccatagctcactgcagtctccaactcctgggcacaagtgatcccccagcctcagcctcccaagtggctgggattacagatgtgtgccaccatgcctggctaaatgtttctattttgtagagatggagtcttgctgtgttgcctaggctggtcttgaactcctggcctcaagcagtcttactgcctcagcctccactgcacctgccttgccttgtttagcgttttttkttttgttttgttttgttttgttttgagacagagggagttttgctgtgtcgcccaggctggagtggagtggagtgcagtggcgcgatctcagctyactgcaacctccgcctcccaggttcaagctattctcctgcctcagcctcccaagtagctggggctacaggaatgtgccaccatatctggctaatttttgtattgttagtggagatgggttttaccatgttggccaggctgggccttgtttagctttactttctgggttgtgatagtgtaagcttttaatttttatctaaatatagtagtacaacaaattagattatataaatgacaaattttgctaatatctttatataacatatcattaaaagggataggcttcatgagaaaaatcttttttacctagagaaaatattgtaatccaaaaattaagtattagctgtatatttgatcactactggaagctgtcaacattgtcacacagatcgtatttttaaaggatttcctggaacctgatgtaacttcttttgttttttgagatagggtcttgccctgtcacccagggtgaagtgcagtggctactcattgcagcctcgacctcctgggctcaagtgatcctcccagttgtagatcctcctgcttgtagttccagcgactcagcctcctgaatagctgggactacaggtgcacaccaccatgcccagctgatttttaaatgttttgtagagacaaggtctccctatgttrcccaggctggtctcaaactcctgggctgaagctatcctcccttggcctcccaaagtgctgacattacaggcatgagccaccacagtcagcctcccttgctttaatcttcttagcagagcgtctttggtttgcacctgtaatcccagctacttgggaggctgaagtggtagaattacttgagcccaggaattcaaggatacagtgagctatgatcaggccactgcattcctgcctgggtgacagagcaagactctgtctcttaaagaaaaaaaaaatagcccgggcacggtggctcgtgcttgtattcccagcactttgggaggccaaggtgggcggatcacttgaagtcaggagttcgagactagcctgaccaatatagtgaaaccctgtttctaacaaacagtacaaaaatttgccaggcatgttggtgtgtgcctgtagtcctagctacttgggaggctgaggtgggagaattgcttaaacctgggaggtggaggttgcagtgagccgagatcctccagcctgtgcgacagtgagaccctgtctcaaaaaaatagccaaaaaacaacagttgcatacagtgtttgttttgatggaaacaattattgaaatgaaggctgtctagagtttttaaaatacacttagaaagtagtgatttatttagaagaaaatggctttaatagttgaaacatctcaataaatagcaaaattaaatagcaaatcatttgttgtatgaaacattaactatagggttgacaaggaaattataatttaaagtgggggttggtactttgtttttttttgagacggagtcttgctccgtcgcccaggctggagtgcagtggcgcaatcttggctcactgcaaactccgcctcctgggttcacaccattctcctgcctcagcctcccgagtagctgggactacaggtgcccgccaccacacccggctaattttttgtgtttttagtagagacggggtttcactgtgttagtcaggatggtcttgatctcctgaccttgtggtccgtcctccttggcctcccaaagtgctgggattacaggcgtgagccattgcacctggccaggggttggtactttctagttaaaatgtttacctaatactcgtgtataaaaatatttaccaaatcgttgtgatagtgaaaaataggaaataaaggatctgttgtggtttagacatagagtagcagaataaacagtagtagaaaaaggaacaagccagcctggccaacatgatgaaaccccgtctctactaacaatacaaaaaatagctgggcgtggtggtggatgcctgtaatcccagctacctgggaggcggctgcaggagaatcgcttgaacccaggaggcggaggttgcagtgagctgagatcacaccactgcacttcagcctgggcaatagagcaagactctgtctcaaaaaaaataaaaaaaaaaaaaagaaagaaaaaggaacaaactagatctacctttgtatctttgtggaaaaatatctcaatattttgagggaaagcaaagtacagaagagtacatgccatgtaacgctatctaaataaaagtttaaaaacatgtaaacagtactgtcttgtttatggactcttagaaaaaagtataaaagaatgcatgggaatgataaacactgtatatttagggtattaatcagttctgggagggtacacaggggacgtagatcctaagatagtatggcgatgttaagactgggcaaagctgggttgtaagttcatggtgggtattttctcttcttcttttttttttttttttttttttttttttttgagatgtagtcttgctctgtcgcccaggctggagtgcagtggcgcgatcttggctcattgcaatgtccgcctcccgggttccagtgattcttctgcctcagcctcctgaatagctgggattataggcatgtgccaccatgcccagctaattatgcatttttagtagagaggggggcgtttctccatgctggtcaggctggtctcgaactcctgacctcaggtgatccgcctgcctcaacatcccaaagtgctgggattacaggtgtgagccactgtgcccaacctatggtgggtattttctttttctctctctcttttttttttttaagacggagtttcgctgttgttgcccaggctggagtgcatggtgcaatctcggctcaccataacctgcacttcctgggttcaagcaattctcctgcctcagcctcccaagtagctggtattacaggcatgcaccaccacgcccagctaactttgtgtttttagtagagacagggtttctccatgctggtcaggctggtctcaagctcccgacctcaggtgatccacccacctcagcctcccaaagtgctgggattacaggcatgagccaccgcaccygacccatggtgggtattttctatacttttagttgctttgaatctttttagagggaatacacagtttaatctcagataagcttaccatgtctgcttatagttagttcagggagagattgatattgatacatgtttccatcggtttgtctgtctttatactagaaggcaacaatattaagagagaaatagaaaatgagaaaatgagagtgctaagggattaagtctatcagctgcagatgatttgatttgtcaaattatgtctttcaaactcatgtaagttaatgagttactaatatttcctgagttttaaaaactcataattttaaaatatgtaagcagttgtttttaaatattagcttaagtgttatgctgggaacataagcaagtagtaaaaattaaattgtttctgttgcaaccctagttaagataggagtgaggcagggagaatgcaggtactatagtaatgacagactgctccccttcaatctgtcttgaaaacctggggccgggcgcggtggctcatgcctgtaattccagcactttgggaggccgaggcgggcggatcccttgaggtcaggagttctcaagaccggcctggacaacgtggtgaaacgccatctctactaaaagtacaaaaattagccgggcctggtggcgggcgcctgtaatcccagctactcgggaggctgaggcaggagaattgcttgaacttgggaaagacaggttgcagtgaaccaagattgctccactgcagtctagcctgggcgacaaagcaagactctgtcttacaaaaaaagaaaaaggaaaaaaatgaaaacctggaacacaccttggccttctaagtctcatctctttttccagtttgtgccattttgccctttgccctcccgtgctttcccctcaaatcttcttggtagtgagttttctagtatcaccttttatctctgatgctttttaactcatcagacataaaagtaatgagctctggtgtgcattataattccttgaggccttgttagaacagtttggctccacctcagagtttctgacctggtagttgtggggtagagcctgtgaatttgcatttctaataagcttccttgtgatggtgatcctgctgtgtcagtatctcagttttgagaactactggtttaactgttgtttctttgcagttcagtaatcttttttttttttttttttttttgagagatggagtcttgctctgttgcccagattggagtgcagtggcacgacctcggctcactgcaacctctgcctcctgggtttaagcgattctcctgcctcagcctcccgagtagctgggactacaggcacgtgccacgaygcccggctaattttttgtatttttagtagagatggcgtttcactgtgttagccaggatgggtctcgatctcctgacctcgtgatctacccaccttggcctcccaaagtgctgggattacaggcatgagccaccacgcttggctgcatttcagtaatcttaaaagagtttcagtaatcttaaaagaggttcagcttaatttcccaaattaacatgattctcagacatttcttttttcctttttttttttttttttgaggcagagtctcgctctgttacccaggctggagtgcagtggtgtgatctcggctcactgcaacctccgcctcccgggttcaagtatttctcctccctcagcctcctgagtagctgggactacaggcaagcgccaccacgcccagctaacttttatatttttagtagagacagggtttcaccacgttgggcaggctggtctctatctcttgaccttgtgatccgtccacctcggcctcccaaagtgctgggattataggcatgagccactgcacctggccgattctcagacatttctaacttgtacatttctaatattttagatccagatttaaagaaccatggtacagcagaacactcaagtccttacccttgggttagatactttgtattttgttttcttataaaattgggaataggtctaaatgatctcttatgaccctgaaattttatatatacatacatattttaatatatgttttartatgtaaaatatgtaacaatgtatacattgttatatatacattgttatatataacacacaaataggtattgatgtatgtaataaacacatatgtaacatgtaacattaaaagatatattaaaatatgtacttttttttagagatggggtctcactttgttacctaggctggggtatagtggcacgatccactgcagccttgaactcctgggctcaagcaatcctcctacctcagcctcccaggtagctaggactacaggctcyctccaccatgctgggctaattaaaaaaaattttttttgtggagatagagtcttactgtgttgaccaggctggtctggagctcctggcctcaagccatcctcccaccttagcctcccaaagtgtggagattacagacatgagccaccgtgcctagccctgaaattacaatgctatgaatcataatctttgtttaaatattttcatagtgtgattttaaccaccaaagagcctcgatttgtatagcaatattcagactactaaaacttgactttagagccatttttctacaaagttaattataacctctctcagtttcccatcttgttcctttcaccttacaccatagggtgaggaccaacagggtaaacaaatctttcccatgctatttttattttgtttcataattgttatgattggggaaggagggtggtttaaaaatagcttgtaaagaagcgttaatttttaccaactaatagcttaagttgcctactcaaggatatagtgaaagggaaatctgcacatcccttgaaggatgccttcccctcaaggaatttagagggtttctttttgctatagtgttgtgatatatatatatgtcttaggctttcaaagtttcagtgttctactttaattatctgttttttttctttttttccttaaaaaattttgtttttttgagacacagtctctattgcccaggctggagtgcagtggcatgatctctgctcactgtggcctctgcctcacgggttctagcgattctcctgcctcagcctcctgggtagctggaattagaggcacacaccaccacacccgactaatttttgtatttttagtacagtccaggtttcaccatgttggccaggctggtcttgaactgctgacctcaggtgatccacccacctcgacctcccaaagtgctgggattacaggtgtgagccaccgcacccggtcaataatctttttataaattgagaatgttctactttaactgtcaaagttccttaccccatcacttttttctaaacataattatatatacattcctgcctcagtatccatgaaaggttggtcccaggtccttccatggataccaaaatctacagatgctcaagtccctgatataaaatggcatagtatttgcgtataacctgtacacatcttcctgtatactttaagtcatctctagattacttataaaacctaatacagtgtaagtgctctgtaaatagttgttatgctgtggtgtttagggaataatgaccaaagaagtctgcacatgttcagtacagacatcattttttccccagtgtatttgacccacaattggtggaactcatagacacagagggctggctgtactttatttccctattgttctttctcataaaatagaaagttgaaattaatgtatacgtttaaagccaactgttaaaacacagccttatatatttgggtattatttttttctgcccacatrttccgactagatcgatgcctttattaaattttaagattcaacttcagttttcatcatgatgtagagatatcagttttatagattgtatgtttatttgccataattgggttttcactatttagattacaccccaaatgacagtttttttttttccttgagtcggagtctcgctcttgttacccaagctggagtgcagtagcacgatgttgtctcactacaacctctgcctcctgggttcaagcgattctcctgcctcaggctcctgagtagctgggattataggagcccccaccacgcctggctaatttttgtacttttagtaaagatggggtttcgccatgttggccaggctggtctcgaactcctgacctcaggtgagccactgtgcccagccatgatgacaatttttaacagctattttaatccacacttacagtcaggataattcttgcacagacccagttggttaaaaaaagaaaaagaaaattttaaagggtaatttatttttcaaatgggcaatatacacacttttataaaattcaaaatgtgtaaaagcaatatatatagttctcattctcacccctaagctttccttcctaaaggcaattatttattaactagtttcttgtgggttttttttttgttttttgttgtttttttttttttttttttgagacagagtctcactctatcacccaggctggagtgcagcggtgagatctgggctcactgcaacctccgcctccctcgttcaggcaattctcctgcctcagcctcccgagtagctgggactacaggcgcgcgccaccatgcccggctaatttttgtatttttagtagagatggggtttcagcatgttggccaggctggtctcgaactcctgacctcatgatccgcccacctcagcctcccaaagtgctgggattacaggtatgagcccctgtgcctggcgtttcttgtgtattcttgggagatattttatgcacatgtaaagatggatagttacgtgctttttcttttttaaaaaagatctgtttctgaatctgaatgtcctgtgtgtgtgtatgtgtgtgtgacagagtctcgctctgtcacccaggctggagtgcagtgtcacaatctcagctcactgcaacctccgcctcctgggttcaagcgattctcctgcctcagcctccccggtaaatgggattacaggtgtgcgccaccacacccagctaatttttgtattttttttagagatggggtttcaccatgttggtcatgctggtctcgaagtcctgaccttgtgatccacccgccttggcctcccaaagtgctgggattacaggtgtgagctaccgtgcccagcccaaatgtacttttaagaataaaaaactggccaggcactgtggctcacacctgtaattccagcactttgggaggctgaggcggaaggatcgcttgagtctaggcattagacaccagcctgggaaacatagtgagaccttgtctctgcattaaaataataataataataataataggccaggtgcggtggctcactcctgtaatcccagcactttgggaggccgaggtgggcagatcacgaggtcaggagatcgagaccatcctgctaacacggtgaaaccccatctcttctaaaaatacaaaaaaaattagcccggcgtggtggtgggcacctgtagtcccagctgctcaggaggctgaggcaggagaatggcgtgaacccgggaggcggagcttgcagtgagccaagatcgtgccactgcatccagcctgagcaacagagcaagactccatctaaaaaaaaaattacattaaaaaaaataataaacaactttgagatagggtattacagtaacatttagtgtacaatttgagttttgacaaatatagttgtccaatctctaccaaaataatgattttgaacatttctatcactcctcaaattttcttcatgtctcttttatagttattcccccctccaactccctccagccactggaaccatggatctgctttctgtcactatagttttgcctgttctagaatgtcatataaatggaatcatacatcatgtagccttatgtctggcttctttcacttagcagtatgcttttgagattcagctgtatcagtgccatcagccaaggaagtgttgaatgagtgtgttaaatgtctattagcctaagtttggcttagggttttaaaattatattggctcctgaaatggactgatggatcttgtattctgcttagataaatcttagctcttgagttaaaaaccttgatgttattcagcatggaaaaaagtaactcagtttgaaaggggcaaaagattaaagcgaaatcaaaagtaaaattccacttaatgaacatggcaggacttcagaattgttcaattgttaaattgttaaattcaagttatattttaattaacaacctgttgctatagcaatgtcttaaataaagccaggtgttcttagttataccaacctgtgctgtcagtaatatttgagaatgggaactatacagtaggctattactttttttcttgagatgggcagaaaatctctattttagagacataaaatctaaaatttgagatatttgagtaagttaatcgttatctcaatccagagccttctttttattcaaactttatttctttttttttgagacgaagtctcgctctgtcgcccaggctggagtgcagtggcgtgatcttggctcactgccagctccacctcccgggttcacaccattcttctgcctcagcctcccgagtagctgggactacaggcacccgccaccatgcctggctaattttttatatttttagtagagatggggtttcaccatgttagccaggatggtctcgatctcctgacctcgtgatctgcctgcctcagcctcgtgctgggattacaggcatgagtcactgtgcctggccctttttcaaactttatttctgtactttatgctttgtgtactccaagcttacagacaggatgaaacgacataagagtctaaatggttttggatttaaaaaatcttagactttactgtttttactcttgtagttttaaagtataatcaaaactagttcttcttgagaactttctttttgtctcaaaaaccaagctgaggggaaatggaatatagtatgatttcctgccttgtgatttttcaggcatcctcacccaataacaagtctcaagtttctgggcttttatgtttaaaaagctgagaagctggtaactggttgtaaagcattattccaggtagaccaatctctgactacaaagccttttttttttttttttttttttttttgagatggagtctccctctgtcacccaggctggagtgcagtggcatgatctcggctcactgcaacctccctttcctgggttcaagcattacttctgcctgagcctctcaagtagctgggattacaggcgtgtgccaccactcccagctaattttgtgtttttttagtacagatggggtcttgctatgttggccaggctggtttcaagctcctggcctcaagtgattggcgccaccttggcctcccaaagtgttgggattacaggtgtgagccatcgctcctgggaactacaaagctctatggtggcttttattacttcagtcagccttttaaaatatattcctttttttttttttttttttttttttgagacaaagtctcgttctgttgtcccaggctggagtgtagtggcatgatcttggctcactgcaacctctgcctcctgggttcaagcaatactcctgctgtagcctcccgagtagctgggactatagacatgcacccactacgctcggctaatttttgtatttttagtagaaatggggttttaccatgttcaccaggctaggctggtctcgaactcctgacgtcaggtgatcctcccacctcggccccacaaagtgctgggattacaagcatgagccactgtgcccagcctaaaatatattccttcaaagttttttctacttttagaaccctggtagtggacttccactgaaagcatatcaacttgtcagatggtccagtataattttggaacatttatgactttaggagcttgtcccaagtgtaacctaatagttttgaggtacaaaaattggccttaaattttttttttgaaaaataataaatgaaatgtttacattaaaacaattttggccaggcgcggtggctcacgcctgtaatcccagcactttgggaggccaaggtgggcggatcaccaggtcaggagattgagatcatcctggctaacacggtgaaaccctgtctctactaaaaatacaaaaagttagccgggcgtttgggtcgggcacctgtagtcccagctactcgggaggctgaggcaggagaatggcgtgaaccctggaggcggagcttgcagtcagctgagattgcgccactgcactccagcctgggcgacagagcaagactccgtctcaaaaaacaaacaacaaacaaacaaaaaaaacagtatttttggctctttaatacataatacatgttttttgtttgtttgtttttttgaaatggagtctcgctctatcacccaggctggagtgcagtggtgcaatcttggcttactgcaacctccgcctccctggttcaagggattctcctgcctcagcctcctgagtagctggtatgacaggcatgtatcaccatgcccagctaattttttctatcttcagtagagacaggcttgttggccaggctggtctcgaactcctgacctcaagtgatctgcccgcctcagcctcccaaagtgctgggattacaggtgtgagccatcacgcccggcccataatacatgacacatgttttaccttcctgattgtatttatttgctaagctctgaacaaagcaaaaatgacccactttaaaaaaatacacattgccttgaagaatccaaaataccttaaagattcaccaatctactcatctcttactctgaaggaatgctcttaagagagtttcaccagcaggacagagaatattggtaacaatataaactttagtaatggataaaaggtacatttatgttgaatatatttcttttctttcttttttctgtaggaattgaatgatctggcacgggaccctccagcacagtgttcagcaggtcctgttggagatgatagtaagtatttaaaaggaataatggagtaatagcataacagtggttattttgtgtgaagaaacaattatggtatagggaagaggcagtgtttaacccttagtggcccatgaagggagcaactctatgttcatcccattatcatctgtgttgttcattacattttgaatcttctgccaggtattggctatgtagttgttctagtcctctcctaccttaccttcatcccttctgggtattttcctggagtgaaatatttaagcttttacctacaactagctattattcttgagtaagataatactaaggatgatagtatgtgtgtctgtgtctgactttctactgactcatacttgygaaatcaggtctttatttatttttttcttgagacagggtctcgctctgtcaagcccgggcctggagtgcagtggcgtgatctcagctcactgcagcctctgcttcctgggttcaagtgattctcgtgcctcagcctctcgagtatctgggattacaggtgcatgccaccacgcctgattaatttttgtatttttagtagattcgtggtttcgccatgttggccaggctggtctcaaactcctggcctcaggtgatccgcccgctttggcctcccaaagtgctgggattataggcatgaaccaccacacctggccaaaagcaggtctttatttttaatgtccaatttatctgcttaattttgtctaaaaagatgatcttaatgcatacattagatgataatttcctctttgttccacttcatttcaacataattttttcccatatagtgtcttttaactttttttaaagaggggatatttgaatgagactatgctatgtgatgtaaaactaattcacaaaaaactgtaacatttggttgggtgtgatggctcatgtccctaatcccagcactttaggagaccgaggcaggtgaatcaattgagcccaggagttcaagaccagcttggtcaacatggtgaagccctgtctctacaaaaaacacacaaaaaaattagccgggtatgttggtgcatgctggtagtccgagctacttggaaggctaaggtgggaggtttgctttagcctgagcctgggtagcagagtttacagtgagccaggaccatgccactgcactccagcttgggcgacagagtgagacgctgtctcaaaaaataaaaacaggacggggcgtcatggctcatgcctctaatcccagcactttgaaaggccgaggcgggcggatcacgaggtcagagtttgagaccatcctggccaagatggtgaaaccccgcctctactaaaaatagaaaaaaatttagccaggcatggtgacaggcgcctgtaatcccacctacttgggaggttgaggcagacaactgcttgaatccaggaggcagaggttgcagtgagctgagattgtgccactgcactccagcctgcgtgacagagtgagacttactctcaaaaaaaaaaaaaagaaaaaaaaatttgtaacatttaacaaatattttaaagtatgcatacttacaaacacttgtgtaaatatgtagattcagaccaaaatgagtacatggttaaattagcttatgtttaatatttttttgtttgtttgttttgttttttaagatggagtctcactctgttgcccgtgctggagtgcagtggcgtgacctcggctcactgcaagctccgcctcctgggttcatgccattctcctgcctcagccttccaagtagcttggattacaggcacctgccaccacacctggctagtttttgtatttttagtagagacggggtttcgccatgttggcgaggctggtcttgaattcctgaccttaggtgatccacctgccttggcctcccaaagttctggaattacaggcgtgagctactgcgcctggcctcaaattgttttttcctgatttttcttaataatgttgtgtctgggcccagcccagtggctcacacctgtaatctcagtgctttgggaggctgaggcaggcagatcacttgagcccaggagtgcgagaccagcctgggcaacatggtgaaaccctctctctacaaaaaaatacaaaaattagcctggcctggtggtgcatgcctgtagccccagctactcaggagtttaaggtgggaggatcgcttgagtccaggcagttgaggctgtagtgagccaaggttgcacaactgcactccagcctgggcaacgggagcgagactctctcaaaacaaaaacaacaacaacaacaacaaaaaacggaaaaaaagaatgtgtctggtctgctaaatcctgaagaatcaaagcaaggccctttcacaaggattactttacaaatagataaatattataaattatgagtctaagtacatgtcatgaaaaaactcatttacattattatattctgacttacctagcgtgagtaactatagtatttggtaccaaacaaggcaggctaagtacttaaactatacaaaataatttagtaagtgctgttacacacgttgtctcatttaagccttacaacaactcatttaggtgagtggagtagaaattttaaattgttttagaaaaaagtcccatgagaatctcatggagattctccatgtgaactcactctcaggttttctgattctagtttgtccttccactgtatcatatgggccacatacatcagtgtactctttctattcagttggaaaagtgcttttaggtaaattcctccaagttaagaatggctgaaaatctttaattaaaagtggttggagtcaggggatttgatttcaattttgaagttttctttagcatgctaaagtaatttgtctttgctttgcttctgccatagttagcactatacatttctttctcaggttgaaaaattgttccctttggagagttaaataaaactctcccacagccgagtgcgatggttcacgtctgtaatcctagcactttgggaggccaggagttcaagaccagcctggccaacatggtgaaaccctgtctctactaaaaatacaaaaattagctgggcgcggtggcgcctgcctataatcccagctacctaggaggctgaggcaggagaatcgttggaactgggaggcggaggttgtggtgagccgagatcccgccactacactccagcctgggtgacagagtgagactctgtctccgaaaaaaaaaaaaaaaaaaaaaaaggctgggtgtggtgtctcacgtctgtacgcctgtaatgccagcactttgggaggccgaggcaggtggattacctgaggccaggaattcaatcaagaccagtctggccttgaactctggtgaaaccccgtctactaaaaataaaaatacaagaaattagccaggtgtggtggtgggagctgtaatcccatctatttgggaggctgaggcaggagaatcgcttgaacccgggaggcagaggctgcagtgagccgagatcacgccattgcactccagcctgggcaacaagactgaaactccgtctcaaaaaaacaaacaaactctcccaaagctaatcagtaagagaaaaaaatagatattattagacttcatcaaaattaaatatatacaggctgcaaatgatgccatcacgaaagtgataaaacatatagaatggaagaaattgttgcaagtcatatatctcataagggacatatatccagtatatttttaaaactttttttttttttttttgagacggaatctcgcttttgtcacccaggctggagtgcagtggtgcggtcttggctcactataaccttcgcctcgtgggttcaagcagttctcctgcctcagcctcccgagtagctgattataggcacgtgccccgccgcccagctaattttcgtatttttggtagagatgggtttcaccatgttggccaggctggtcttgaactcctgacctcaagtgatccgcccacctctacctcccaaagcgctggaattacaggcatgagccaccccacccagctgtttaaaaactcctataactcagtataaaaataaataaccaattaaaaaatagtcaaaggatccgagtagacatttctccagataagatggctagtaagcacacgaaaagatgctcaacatcatttgtcattagggaaatacaaatcaaaactacagtgaagaagagccaggcacagtggctcatgcctgtaatcccagctactggggagactgagactggaggatcacttgaggccaggagttttatgccagcctgggcaacaaagcaagaccccatctttaaaactaaaaattagctgggagtggtggctcatggctgtagtcccacctactcacaaggctgaggcaggaggaacacctgagcccagaagtttgaggctgcagtgagctatgatttggccactatactctagcttggatgacaggttgagacccagtctctaaaaaaaaaaaaaaaacaagtattgatcagatctttctgatgaaccccacataagagtacatcaagtatgattggatagctaaatgtccttttgtcattttatttttgttataaggagtcagaatttaatcttagaagaaggaagagagaaactgttggccttttgaaacttttgagctccttttgactatcctggtacccaaatccctcagtaccacatgttattgatatttagtgtaaaaataaagtggagacttgtgctttattttaaaacatccagattttaatgttgatatttagtataaaaataaagtagagatctgtgctttattttaaaacatccagattttaatgtactagtaaattttttttcactttcctgcaaagatctggtaagcaggaagaaatgtacatcctgaaagaagtaagcagccgggcccggtggctcacgcctgtaatcccaacactttgggaggccgaggcgggcggatcacgaggtcaggagattgagaccatcctggctaacatggtgaaaccccgtctctactaaaaatacaaaaaattagccgggcttggtggcaggtgcctgtagtcccagctattcaggaggctgaggcaggagaatggcgtgaacccgggaggtggagcttgcagtgagccaagatcacgccactgcactccagcctgtgtgacagagcaagactctgtctcaaaaaaaaaaaaaaaaaaaaaaagaaaagaaagaaacaaataagctgaagatttaatggccatatatctgtttccttctctcttccctcccttcctttccccctcctcctcccctccctctctccctcccttctccctcgtcttcctctcctctggtcttctttaaaggcaggggctcactctgttgcccaggctagagtgcagtggcgcgattgcagctcactgaagcctcaaactcctgggctcaagggatcctcccacctcagcctcctgagtagctgggactatgggtacatgcccctacacccctggctaatttaaaaaaaaaaattgtagcaatagggtctcaccatgtttcctacgctggtcttgaaatcctgggctcaagtgatcctcctgcctctgcctcccaaagccctgtgattgcagctgcgagctaccgcacccagctttcttttcttttgaacagttggtaaatgtgactctcttgagatctgtgcattcaagtgtaggtctcyggggattcagtctcatactatcaaatattctcactgtcccctgctgttttgtttgtttgtttgtttttttgagatggagtctcactctgttgcccgggctggagtgcagtggcgcaatctcggctcactgaaacctctgcgtcccaggttcaagcaattctcctgtctccgcctcccaagtagctgggattacaggcatgcaccaccacgaccgactaattttttgtatttttagtagagactgggtttcaccatgttggccaggctggtctcgaactcctgacctcaggtgatccacccacctcggcctcccaaactgctgggattacaggcttgagccactgcgcccggcctgtcccttttaacctcaaggcttcatccagaatactaaagagtaatcattcatctgtgaacttcacatttaaactctcataaaacagattatgtaactttcagtttgtgtaatttggtttgatagtattaaaccaacatagtgctgggaacttatttttgttttttactatcaaaactttttattttggtcaattttgatcaatcctaagatggatcattaaatgaaagatttttgaaacagatgtttatgtaaaatgtagcaatattttatgcttatggtccagtatttcattcagtaactattttgggggtcctttttacttgaacctctagtaattcttgagctatttctcttttcttgagacagagtctcacatcgtcgcccccctggagtgtagtggcatgatcttggctcactgcaacctctgcctcccgggttcaagcagttctcctgcctcagcctcccaagtagctgggattacgggtgcctgccaccacgcccagctaattttttgtatttttagtagagacggtatttcaccatgttggccaggctggtcttgaactcctgacctcgtgattggtctgccccggcctcccaaagtgctgggattacaggcgtgagccaccacgcctagcctacttgagctatttctaaaaacattgtaatgtgaggcaggtttggtattctgtcactagcttctctgatttatacttctgcctataagagctaagagtctagaaaggcttccagagagtaacctaaatcagtggttttagtaggtatctttatattcaaccagtgtgacaaaattctcaattaagatttaaatggtaggtctttaaatgctttaattacattcatgtgaatgggttttagtttctctttctctgcctttttttggtactgtagattctagatcattttatgagagccataaagattatttgtcttggttgctgcattagtaattttcttcttccttttccttctgctattttaaagacttagccctgtgtatgtgtttttgctcatttttttgatgatggaatttgaccttaataacagtgaagacaaattaacatagtgttattagaatgtgaataggtttttattcagagtttaatgccaatggattacatatgtttagtcctgttggaatgttaaacagatatgatctactaaattaaatagatatggattacagatgagatcatctatgatgttgagttaaaagttcacaataatgtaagaatgttcggcatggtacagtggctcatgcctgtaatcccagcactttggtaggccaatgcagaaggatcgcttgaggccaagagtttgagaccagcttgggcaacatagcaagacccgatctctacaaaaataaaaattaaaaaaatgagcaggacatggtgacacttgcctgtagtcccagctactcagttggctgacgtgggaggattgcttgagcccaggagtttgaggctgcagtgagccaaagttgtgccactgtactccagtctgggcagtagagtgagactctgtctcttgggaaaaaaaaaaaaaaacttaaatatacaatatgctagagtatctctaactttttgtagcgtgggtatgaaagattgcaatattagttgaaaatatttatttttttccccatcttctatcaagaagggtattctggcccggcgtggtagctcacgsctgtaatcctagcactttgggagaccaaggtgggcggattgcctgagctcaggagtttgagaccagtctgggcaacgtgacaaaaccccatctctactaaaaatacaaaaaattagccgggtgaggtgttgcacacctgtaatcccagctacttgggaagctgaagcaggagaattgcttgaacctgggagkcagaggttacagtgagctcagattgtgccattgcactccagccttgacaaagtgagactgtctcaaaaaaagaaagaaaaaaaagaagggtattctgggtattctggctgggcactgctggtggctcatgcctatattcccagcagtttggggggtcaaggcaggcagatcgcttgagcccaggagtttgagaccagcctgggcaacatgggaagaccccgtctctattttaaaaaaaaaagaagaagaagggtattctttccataattataaacattggcagcttgttggcatttctgcttcaaccctgttggggattctgcgttgtccaattgttagtagattttgatcccacagcctatttgtgctttgtttgtgttagtaggaagaacagggaatcacaaaaaaggaaatatttagctaaaaatttctgatttaaggccgggcctggtggcttatgcctgtaatctcagcactttgggaggccagggtgggtggatcacctgaagtcaggagttcgagaccagcctaaccaacatggtgaaacccagtctccactaaaaatacagcaaaattagtcaggtgtggtggcacacacctgtaatcccagctactcagggagctgaggcaggagaattgcctgaacctgggaggcggaggttgcagtgagccaagatcgcgccactgcactccagcccaggcgacagagcgagactccatctcaaaaaaaaaaaaattctgatttaaatttttctaataacttcttaagtctggtagtagtattagcaggaaaagaaaaagattgatcctgaaaagactagtgaagatcttgaattagtacctaaatggttaatggaaaatttaatttttttaattgtctcaatatttttatattttgtctgggtgtggtgacccacacctataatcccagcactttgggaggctgaggtgggtgaactgcttgagcccaggagttcaagaccatcctggacaacatagtgagaccccatctctttttttttttgagatggagtttcgctcttgttgcccaggctggagtgcaatggcacgatcttggctcaccacaacctctgcctcccaggttcaagcgattcttctgcctcagcctcccgagtagctgggattacaggcaatgcgccaccatgcttggctaattttgtatttttagtagagatggggtttctccgtgttagtcaggctggtcttgaactcccaacctcaggtgatccgctcgcctcggcctcccaaagtgctgggattacaggtgtgagccatcacacctggctgcgcatctctatttaaaaaaaaaaaaaaattaatattttattaagtgctttctttctttttttcttttttaagttgttttctttctttctttctttttttgtttttttgttttttttttgagatggagtctcgcactgttgcccaggctggagtgcagtggcacgatctcagctcactgcaacctccgcctcctgggttcaagcgattctccttcctcagcctcccgagtagctgggattacaggcacctgccactacgcccagctaattttttgtattttcagtagagacagggtgtcaccatgttggccaggctggtcttgaactcctggcctcatgattcatctgcctcagactaccaaagtgctgggattacaggtgtgagccgctgcgcctggccttaagtgctttcttaaaaaatagtttagtgtattttaatagcaaactcaaaggaacagtacagagacagacaacattaaaaacatacttgcatgtagggcaactcagaaaaatagagtgaatgaatgaagagtctaccatacgataaaaacgctacaaacaccatttagttgccatcaataaaaatttacggccgggcacagtggctcacgcctgtaatcccagcactttgggaggtcgaagtgggcggatcataaggtcaggagtttgagaccagcctgtccaacatagtgaaaccccgtctctactaaaaatacaaaaattagcctggtgtggtggtgtgtgcctgtaatcccagctactcaggaggctgaggcaggagaattgctgaacccgggagccagaggttgcagtgagctgagatcatgccattgcactccagcctgggcaacagagcgagactccgtctcaaaaaaaaaatatatttttttttttgcttgatatgaaaaaaatccaggagggtctgggcacagtggcttatacctgtaatcccagcactttgggaggctgaggtgaggggattgcttgagcataggagttcgagaccagcctgggcaacgtaacaaaatcccgtctctacagaaaatagaaaaattagctgggtatggtcccagctacttgggaggctgagacaggaggatcatttaagcctgggaggtggaggttgagctgaggttgcgccctttactccagtctgggtgacaaggagtaaaaccctgtctcaaaataaataaatctaggagagcagtgtacaagcagtggcagcatcagcagtcatggcaggacaagagtttagaaagtttctttcactcttttacagagtattggttgaaaggagtgctgccaaaactataaccaaaggaggcattatgcttccagaataatctcaaggaaaaatattgcaagcaacagtagtgttgacagttgttgaatttgagctctaaaggaaagggtggagaaattccactagttagcgagaagttagagatacagttctcctagaatatagaggcaataaagtagttctagatgacaagttttccttccttttttttttttttttttttttttttgagatggagtttcgctcttgtttcccaggctggagtgcaatggtgcaatctcagctcactgcagcattcacctcygagtttcaagtgattctcctgcctcagcctcccgagtagctgggattacagacgcccgccatcacgcccagctaattttttatattttcagtagagacggggtttcactatgttggtcaggctgatctcgaactcctgacctcaggtgagccacctgcctcggcctcccaaagtgctgggattacaggcgtgagctaccacacccagcgacaagttttatttcttatttagagatggcgacattcttagtgtgtagactgaaataaatcactattgaaatgacatcaacgtgaaagctgcccattccactaaagttctgaaatctttcatcatgtaaataatttccatgtctctcttttataataaaccaatgatataactagtgacaaaaataaaatccaactgctagcattgtccagaaaaaatttacaggtatgtttataattgttataaaggtgaactgctgaaacttgttcaccgaaatagtttgacttgaattaatgctttacatcctcaattttatattagaaattcacacacaagttaaaatggaaaaactgccaatacctgatttctgtcccctgtttttccactcgcagtcatatatgtagttaccttttgaccccgtgggggaaaatacatctaacagagaactatcaataacagaaagaagaaaaataattgttttttttttttttttttgaacatgaaatgtttcccaatcttaagcacagtctccatgtaattggcatgctagctggatgtcttttggcatacttgttacatatttggcatgagttacacataagttggtgtcttcataaaggctcatcagataggcctcacttgcctcctgcaaagtaacaaaagccagaagtgtagatttgtttcgaagtcctgagcaacttcttgtatcagatgctggaaaggaagtttgctaatcagaattcagtggacttctgatgagatctgttttcacagagtaccacagtaccagacctgtagcagtgaggtttctttactcttccagtaaagggtgcactcctgtgagtgacttctgtagctaattgcttcctgggtgctttaccactgggccaatttgctggtaatctgccttgtactagtcatgatctagaggcccccttacttatcccccttctcagcagacattagagatgagggcgccactgtggcaggcagtgcctgagaacacttaaaagcagtgctttcttactatcttacccaactcttacagctttgagtggaaatgcaggtacaattaatactcttccattataaccacaaatttaaataacaggaaagaattaagtagaagaacaggtcccttgaccagttggtcatacttttgtctaatagtgtttttagtcttgttattgggggttgttaattctagttatcaatgttttatttactcaaattgtaagtatatttgtgattaaaaatagagtgagactcgtgtatgtgtgcatgcatgcgtgtgagcatgtgcgtgtgtgtgttttagtcttgtttttaatttttttcagaaacagggtcttgctatgttgcctgggctggacttgaactccykggctcaagtcatcctcccatctcagcctcctgagtaggtgggactacaggtgcccacttttgtgtctttaaacaacatacaaggggctttttataggacttcccttgaagatactaggtccagttttagtggcccagaatggctttgtccttggcttactcagtccattaaatggtcagcagagagtaatataagtgtttgtaagtactagtgagggctaatctaaggaagggagcctcagcaattcctrtcctttacctttaacccctaatcaacaagctgctatttttaggttcaagtcscagtgagcaacaaascaactttagggattaatttgatattaaggaggttggaaggaactttaggatttggactgacattctggtggatttttatatggcttcttagtcttcatgtttcttctaccttgtgacaagagttacctggtttgggttgttcaaatataaccccagtgacaacttcccttaggttgctcagatcatagtatgaatggtaagtgtgctaagtagtagcttaattataagtaaaaactctggcttttgatctctcatgatgcacttagtagcatgagaacatggaacaagcatcattttctgcatttggaagatatttatttattgaacaagtttataacttattagaagtatccctggagcttgtaatcaaccttgggctttcagctaatattttcttcttaaattttactccttttttctcttttttcctctttaacttatcctttacattaggagagatgtttttctttctttaatgagggccagtaatgtacagacctacacaagagtttttagaaattttttctccttgttaaaaccagtctttcttaatttgagtattatctaccttgactttactgttttgtcccccgtataccagcattataaaaggagtcatgcctgtaattccagctttgggaggcygaggtgggtggatcatctgaggtcaggagtttgagacctggccaaacgtggcaaaaccttgtctctactaaaaatacaaaaattagccaggtgtggtggcacttgcctgtagtcccagctacttgggaggctgaggcaggagaattgcttgaacccgggaggcgggggttgcaatgagccgaaattgcgccagcgcactccagcctgggcgatagagtgagactctgtctcaaaaaaaaaaaaaaaaaaaagtgtattatatgtaattgttttgaagaaatgatttaccctgtgaggtaaagaaataactgtttaaaagtagaactgtaagccttgtcaagaagtttgtctacctgacatgaagtttcaagaagttttagcccaaatactttcggttttttttgtttttgtttttgagagagtcttgcagtggcgcagtcatggctcattgcagcctccacttctcaggctcaagcagtcytctcacctcagcttctggaagtgttgggattacaggtgtgagccaccacacctggctctaaatatttttcattgagcaccttatcagtgttctaggccattctagtcatttttcttgtttctttagactgttaatttatgttcctcatcttgctcatactcattatcatattatttataaatgaatttggattagaaggggaatgatatgttactatggcgtagatacaatgtagatattgttacatggtgacttttttcttgttatttttcagtgttccattggcaagctacaataatggggccagtaagtattcagattaatttcagaataaacagtttatgtaatttactcattttaatcccacttttcttgttatcaacagaatgacagtccctatcagggtggagtatttttcttgacaattcatttcccaacagattaccccttcaaaccacctaaggtaattaattggaatgtggcagtttttaatgtactttctataatactaataaactagtttacagaaagtttcctttctttctgtaggttgcatttacaacaagaatttatcatccaaatattaacagtaatggcagcatttgtcttgatattctacgatcacagtggtctccagcactaactatttcaaaaggtaacagtgggtatttgatatcaagataaagcaaccgtgtcttttgtctttttagagttatttatttttgaaaagattacttatgtttcttttaagaagagatagcaattcttcttaatctgaaatggaccttgagaactgaaaacgagttggatttttcaagcaaaagtattccttggtgtagtgactagtctgtcagttgtgctactctagcataggttagaagatgaacactgggcctggtgccgtggctcatgcctgtaatctcagcactttgggaggccgaggcgggcagatcacaaggtcagcagatcgagaccatcctggctaacatggtgaaaccccgtctctactaaaaatacaaaaaaattagctgggcatggtggcaggtgcctgtagtcccagctactcgggaggctgaggcaggagaatggtgtgaacccgggaggcagaggtttcagtgagcagagattgtgccactgcactccagcctgggcaacagagcgagactcygtctcaaaaaaaaaaaagaagatggacactggtatgaatgtttttttagagcataaagtagagcacaattaacatctcttccaaccttgagattcatgaatggaaaaagatagatactattgcagaataggaaatagaccagccctttagacaaatgcctatgctgtaaacatagacgttaggttcttgaagaacaaaatataggtaaatattttaccagctcttgtctttaggtttctgtatcaatgaactgagtgatgtagttgttgtcttaatgtgttgatttgaaattgtacaacccttcaacattattcccagatgaaatcacagttgcgttacaataatctagattttttttttttttttttttttttgagatggagtctcactctgtcgcccaggctagactgcagtggtgcaatcttggctcattgaaacctccacctcccgggttcaagcaattctcctgcctcagcctcccttgtagctgggattacaggcacccgccaccacgcctagctaatttttgtatttttagtagagactgggtttcgccatgttggccaggctggtctcgaacgcctgaccttatgatccacctgcctcggcctcccaaagcgctgggattacaggcgtgagccaccgtgcccagccaaataatctagaatttataaaggaaaacaaaaacaagtatttatggcctggcacggtggctcacgcctgtaatcccagcactttgggaggccgaggcaggagaatcgcttgaacccaggaggcggaggttgcagtgagctgagattgcgccactgcactccagcctggccagcctgggggacagagcgagactccgtctcaaaaacaagaatatttatcagatctcactgctgtactctgaaaggtgataaaagagttcactggatgtacttttgtgaaaatgaaatcagttgtttaagagaaaaatcaaatatggtaatggattaatatgtttaaaatatgaagtacaaaaatcagaaaaaaattcagatcccaatagatgaatggacacaggggaaccaaagaataaataaatgaatgttacgttcctattttttacctttttaattaacaaagatatttttaaaagaagacaaaacactaatgaggtacattgaaatgaacactcatattcttcaagtagaggtatagatttgtagagcccagtctgccagtatgtgttaagagacttaatcatccatgcccattcacccaataattctagtttcatttatttatactaagaaaacaatcccaaatgctgaaaaaactttgtatacaagtacatttgtgacattgtgatttagttctgaaaattggaggttacttacagtagaggaaaaaatagatcggttccagcacatgcatttaaaagagtattgaccctggccaggcatagtggttcatgcctgtaatcccagaactttatgaggctgagatgggcagatgacttgagaccaggagttcgagaccagcttggccaacatggcaaaaccccatctttactaaaaatacaaaaaattagccaggtgtgatggtgcgtgcctgtagtcccaactactcaggaggctgaggcgggagaatcacttgaacccgggagacggaggttgcagtgagtcaagatggtaccattgcactctagcctgggtgacagagggagactttgtctccaaaaaaaaaaaagtattgatctttacaaatattgtgaaaataggaaaatactgtgcttgagaaaagcagaaaaaagaaaaaaggcatatacactgtaacaagagttacatataaaagtatgttgagtgtccagaaatagacaagcaatgttagttttggtatttgtgtggtgaaatgtggtgtgtgatttttttttttttttttttttttgagagggagtttcgctcttgttgcccaggctggagtgcaatggtgtgatcttgactgactgcaacctccgcctcccgggttcaagcaattctcctgcctcagcctcccaagtagctgggattacaggcacccaccaccacgcctggctaatttttgtatttttagtagaaattatctgcttataatttaccatttgaaccattaagtagaaattatctgcttataatttaccatttgtttaatgcatgtatttagacaggaagcaacatagtttcatggtaaagaacatagattctagatccaattgcctgtgttcagatctcagatccacctcttattaaatgaggctagagacacattggcccctgtattcctcagttttttcatctgtagaaaaggaacaataatacatatttcattgttgttacgaagattaaagaagcaaaaacagacagttaactggttccttgtaagtactccaaaaactggggataaaggcacagttgtcaaaagtgttgggtatttgtcatgttatcacttggatgtcaagactcaatcttaaaaaaaaattattattattattatttgtttttttttgagaaggagtttcacttttgttgcccaggctggagtgcagtggcgcaatctcggctcaccacaacctccacctcccgggttcaagccattctcctgcctcagccttctgagcagctgggattatagggcatgtaccaccacgcccagataattttgtatttttagtagagacggagtttctccatgttggtcaggctggtctcgaactcccaacctcaggtgatccgcccgcctcagcctcccaaagtgctgggattacaggtgtgagccactgctcctggccacaaattaattttttaaagcaaacaaaactctgagacattaatttaaaatttttggagtcccaggcagaaataaaaacaggatgccagagaaccacatttttttaaagttattacaactttaatgaaatagttttttagagaagtgtccccttttcttttggtaggcccccttacaattcaagagctacttgagaaagtgtttgtggacctgtgcctggcctggtgagggtcccattggttgcacttccttcaccaaatagcaatagagatgtaaatctagtaatgggaccaagataagtagaattgtgtgagaggtgtgtgtttggtggggtgaggtgttggagacacaagatagctgaaattattgccatacctctttttgttcttccccttgcctagcgttgattttttttcagctattccaaatgataaggactgttacaagtctgatttgttaggttctctctatctggatagctatcctttaaaatagttgcagtgccattttgttgaatttgattgtattaactgtctcagatttaaggttttaatgagtccctttttgtaaattgaatgtatgggcaagtagttctatgaaatgccttaatcctgtatatgatattattcctttaacatatagtctgtcttcaaggacagaaattttgacccagtattcactctactttgaaggtccgtgatggggacctaaatatttaaaaaacaaaaacaaaaacactgaaaaaaactgaagggaagcagataagtgtgccataaagccatttgattatatgtttttagaagtgaaagtaactgttgctgtaacactagtgaaaaagtaatactggccaggcgcagtggctcatgactgtaatccactttgagaggccaaggaaggtggatcacttgaggtcaggagtttaagaacagcctggccaacatagtgaaacctgatttctaccaataatacaaaaattagcagggcagggtggtgtgtgtctatagtcccaactactcgggaggctgaggcacaagaatcacttgaacctgggagggagaggttgcagtgagccaacatcacaccactgtgctccagcctgggcaacagagcaagagtctgtctcaaaaaaaaaaaaaaagtaatactgatgaagaatatatataggtaaaagttcagtgaagagactatacaggttatagaaataagagttactatctttacagaagaaggtatagtatatgtatcagtccattcttgcactgctataaagaaatacctgagactggataatttataaagaaaagggttttgccaggtgcggtggctcactcttgtaatcccagcactttgggaggccgagatgcgcagatcactgaggtcgggagtttgagaccagcctgaccaacatggagaaaccccatctctaccaaaaatacaaaaattagcctggcttggtggtgcatgcctgtaatcccagctacttgggaggctgaggcgggagaatcgcttgaacccgggaggcggaggttgcaggaagctgggatcgcgccattgcactccagcctgggcaacaagagtgaaactccgtctcaaaaaaaaaggaggtttaattggctcacagttctgtgggctatacagaaagcatggcagcatctgcttctgcggagtcctcgggagcttttactcatggcagaaggcaaagggggagccacctgtctcacatggcagtagcaggaccaagagagagatgggggaggtgccacacactgttaaacagccagatctcatgagaactctatcacaagaacagcaccaaaggggtcgtgctaaaccattcatgaaggatacacccccataatccagtcgcctcccaccaggccccacctccaacgttggggattacagttgaacatgagatttgtgtggggacacagatccaaaccatatcagtatattagaaaccaaaatgaattcttcatgaaatcaagaagctaagtagtgtactaaaaatcttttcacaaggtccagatagccagtactctcctttcctggaaagaaagaaaagccctttctttaaaacctgtcctttaaagttgacttattagaatatttagaagaataagttaaaggaacattcaaaaatttctaacttccctgttgtcatttccaggaaatacatgaagtctttcctaattgatgttagaatgttctatgcttgaagagggcttcaggtgatgacacctgacaataggaaaatgtttttggaatgccagctgccagaattgtgggtaacaggaatgaagagtcagaaaacatctctcctgattttttaaaaaaacttttcatatactcttaaggcaaggaaatagcatttttgttaccaaactgaatagggcatgccaactatttctttacttctcagaagcccttgatctctataggatagatttggtaggaatatgagcgaatcctttccctgctgaatttatgtgttgggagtaaaatgggctgagagttattatctcttggtacagaacacctattagagaaaagaaagatggctgagctctattagcattagtatagaaggatttaaatttattttgtcagaggctactgaacttaatgtaatcagtgactttatgccccctttgcattcagtaaggaatgcataagttaatgatagatatggccgggtgtggtagttcacgcctgtaatcccagcacttcgggaggccgaggcaggtggatcacttgagcctaggagatcaagactagcctggccaacatggcaaaacccaacctctacaaaaaatacaaagaaaattagctacacatggtggcactcacctgtagtcttacctggagagtgaggtgggaggatgacttgagcccaggaggtttaggctgcaatgagccaagatcatgccactgcactccagcctgggcgacagagtgagaccctgtctctaaataaatacatacataaataaataaatattttaaaacataagttaatgacagatttgaacaaaggaaattacactattgagatttgtctgctacatcccaggttgtcaccgaggaaatggcttagatgagattctaaattgtcactgaagagaatttgagacattcatagaagtatgttgtattctctgtaatgagtgtatgaccatccccatttaggggcaagtgtttgcatttatgttcttgatttagactgaattgttttcaactgaaaattaaacaaaacaattgtctgaatgtggtgcctgccactggaaaacagtgattgttggattttatggttgtcgtttttgctaagaatattcagtagtgtggctgtcttttttttttttctttttgaggcagggtctcactctgtcacccagattggagtgcagtggtgtgaacacagctcaatacagccttaacctcttgggcgtaagtgatcctccyacctcagcctcctgagtagctgggaccataggagtgtgccaccacatccagctaatatttttattttttgtagagacagaatctcactctgttgcctaggctggtctcagactcttggcctgaagcgatccttctgctgtggcctcccaaagtgctgtgattacaggagtgagccatcgcacttggaattttgaaagccatttatccttgaatatgggcttctaaaaaattgaactttatgggatctgaaaaatgttcttggtctagaatttagacaaagttctaattctattctaattactagccagggacattgaacacgtcactgcacctgtctgggccagctcccttaggagttcaggcataaagacagtcatatcaactcttcttacatcatgggattgttgtgagactttgcacaaaggggcttatatttgtatctgggagaccaagatgtcatttaacattaattttctgctatttgttttattttattttttattttttattwtaattattattttttggagatggattttttgctgtgtcgcccaggctggagtgcaatgctacgatctcggctcactgcaacctccacctcccaggttcaagcgattctccagcctcagcctcctgagtagctgggactacaggcacacaccaccacgcccagctaatttttgtatttttagtagagatggggttttaccatgttggccaggatggtctcaatctcttgatctcgtgatccacccccctccgcctcccaaagtgctgggattacaggcatgagccactgcagccagccttcatttttattttttaatgacctaacctaaagtctgtttaagcttcttaaaatccttgttggtaggctgggtgcagtggctcacgcctgtaatcccagcactttgggaggccaaggtgggcggatcacgaggtcaggagatcgagaccatcctggctaacacggtgaaacccccgtctctactaaaaatacaaaaaattagccgggcgtggtggcgggtgcctgtagtcccagctactcaggaggctgaagcaggagaatggtgtgaacctgagaggcggagcttgcagtgagcctagaccgcgccgcgccactgcactccagtctgggcgacagagccagactccgtctcaaaaaataaaaaataaaaaaaactatttgccaggtgtggtggctcacgcttgtaatcccagcactttgggaggccgaggcgggtgaatcacgaggtcaggagttccagaccagcctgaccaacatggcgaaaccccatctctactaaaaatacaaaaattaggccaggcatggtggttcaagcctgtaatcccaggactttgggaggccgaggtgggtggatcacctgaggtcaggagttcgagaccagcctggccaacatggtgaaaccccaattctgctaaaaaaaaaagaaataataataataataataatccttgttggttactgttaatataaagttaagtaaaacttacaaagctgctaggcattacagtataaattcttagaattttctcatgttttggcgtctcatgtttctctcaaccctttgctttgatcctctgctaatttatatgatttttttcattctagtactcttgtccatctgttctctgttgtgtgatcccaatccagatgatcctttagtgcctgagattgctcggatctacaaaacagatagagaaaagtaagtatggcctcaagatggaaagttatctgtggtgggatggagatgtttgtcacaaatctttcttgtttaagggctgaatatcggccagatatttaaagtgaagtcctaatatactctcctggggctagaaaagagaaatatatgcattgagtattattataagtagatgatgccagtcttatccctgattgtttcacgtgactcctcttgtctacaaaaacttttttttttgtttgtttttttttgagacagggtcttactctgtcacccaggctagagtgcaatggtgcagtcttggctcactgcaacctccgcctcctgggttcaagtgattctcatgcctcagcctcccgagtagatgggattacaggcgcaggccaccacgccaggttcgttttttttgtagttttagtagagactttyaccatgttggccaggctggtttcgaactcctgacctcaaatgatctgcctgcctaggcctcccaaagtgctgggattacaggtgtgagccaccacacccatacaaaaactttcctatggtatatttttcaacagcttaatgccttatgcttggcttttgatatataaagcacttttcatcaagtgcccatttgcctgccataggtatttgtcaattaatgggaaaagagaattgatttcctaccatttgacataatctaaaggaagaaagcaaataaatgccattagacgtgaaagccccaaatttcttttaaaaacaaaacttgatgtagaatttgggtattttagaattgtactatgaattattgaacagtggtcaagatatcaaaagagatagtagctaaaagtgttctagtagcattttttcttttctttttttcttttgagatggagtcttgctgtgttgcctgggttggtctcaaactccctacctcagcctctggagtagctaggattataagcatgcccaccatgcccagcactaataacatctgttttatgtagtattcagtgaagttataagaggaactagataggagagggtggatagttcttttagggccgggcgcagtggctcacgcctgtaaccccagcactttgggaggctgaggtgggcagatcacaaggtcaggagtttgagaccagcctggccaacggggtgaaaccccgtctctactaaaaatacaaaaattagccgggcatggtggcgggcacctgtaatcgcagctactcgagaggctgagataattgcttaaactcaggacgtttaggttgcggtgagctgaaattgcaccactgcacttcagcctgggcgacagagcaagactcacgtctccaacttgagttctagtggattagagaggcatagatacgtttttgtttttagtggaggtaacactgggaatgggatattctaacagtagttggttcttgctttttcctatttgtgaatttattstcaaatttttttgattagagaactgttttgtccgatatttagaattgtgggtctgaatgcttaccagaagtcatttcccaagtcatcatggagtaatgttgaacactgttgaacagaactttcccaaactgcactgcccccaccctctaaccccccacttttttttttgcagagacagggtcttgttcttcagcccagactggagtacagtggcacaatcgtggctcactgcagtgtcaaactcatgggctcaagtgatcctcccaccccagcctccccagtagctgggactgctagtacatgccactacacctttccagcctccccagtagctgggactgctagtacatgccactacacctggctaatttgtttttttttttttttttttgtagagacaggatctcactatgttgcacaggctggtctctaattcctggcctcaagcaggccttctgcctcagccccccaaagtgctgctgttacaggcatgagttaccgtgcaaggccagcatacccacccccaccccccccccttttttttttttttttttttttgaggcagggtcttgctctgttgcccggactggaatgcagtggcacaatcacagctcactgtaacctcaacctcccaggctcaagtagtcctcccatctgagcttcccaagtagctgggaccacaggcagatgccatcacatccagctaatttttttttttttgagacagagtcttgctccgttgcccaggtggaatgcagtggcacaatcttggctcactgcagcctctgcctcccaggctcaagtgattcctgtgcctcagcctcctgagtagctgggattacaggcgcacatcaccatgcctggctaatttttgtgttttcagtagagacgggattttgccatgttggccaggctggtctggaactcctgacctcaagtgatccagctgctccagcctcccaaagtgctgggattacaggcgtgagccaccacacccggcctagcacccgttttttaataggagaattatagaatcatttgctctgcttactttattcaaatgttcttctgaagcaataaacccattcattttgtcaaccaaattgttgaaattagttctaccagaaccaattgttttattgatatgaaaggaaagtttggttttttttccccctttttttttgagacagagcctcactctgtcacccaggctatggtacagtattgcaatctcagctcactgcaacctctgcctcctgagctcaaacgatcttcccacctcagcctcctgagtagctgggactatagtcatgcgccaccacaccctgctaatttttgtatttttttgtagagacagggttttatcatgttgcccaggctggtgtgaaacgcctgggctcaagtgatccacccgactcagcctcccaaagtgctgggattacaggtgtgagccaacatgcccagccttctgtcggtttaatcattattagtatatgagttcaagaactatgtaatgtagaatcatataatttcaagtactttaaatgaatgaattgagtggacatcttttgtagaaataggccaatcaagtatggaataaggtatatgccaacaaatactaaaatttaatcagaaccctctataagtagcaattaaaggagactttcacattttacagctccttcccattatcattgaattaatccttatcagaaatttgggatagaaaggggcctttccttgaatgtcctataagctactctcttcaagttacttgatgggataatgaatggaatctgttgcttactgactccacacctatgttaagccaagcttctctttgtgtgtacaggtacaacagaatagctcgggaatggactcagaagtatgcgatgtaattaaagaaattattggataacctctacaaataaagataggggaactctgaaagagaaagtccttttgatttccatttgactgctttctatgagcccacgcctcatcttcccctgtgcacatgtttacctgatacagcagtgctgcgtgttgtacatacttggaacaacaaactagaaatactgtacttctgtaccaacattgcctcctagcagagaagtgtgtgtgtgacaagccagttctacaggcattacctaggtgtgagactaaaagcttttcttattgacttaaatttggataacagcaaggtgtgaggggggtggtgggtatggtgtgtgcttggatgggaaagaaaaggctccactcacctataggagattatttttaagtggaatccatttaaactcaaaacagttatgaaaagcaaggtgaagaacatgaagctgtgtctgtattcattttattccgaaggagctacgtcttaggtgaaagttatgaccaaccagattaaactctacccacatcctgcattttaaggtctaagtttaactggtcaacatttaaatggattggagctattagtacatcaagtgtgatgggctttgttcccaactcttttacatcwccctaccccttcaacctttggcctttcagcccttctttctctcttccatattctttggtttgtatgtggtttctcagttaatacatagctaatagctcttatttttcttatgtttttaaccgcttaggtctatttggatgtaagggtgaaaattcatttgatggaaatacttgtgtatatttaaagacccaattkctcctctggagcttgtactttcaagaatgattaatctgtgtaataaactggttactacagtcattacatataattttgtgtgaataggctttttcatttttaagaagtttgtctagctgagattagtggtggattttctcccacttctgaaatgttcatttatactggttgcattttaagatcatgaaacaattccagttacattgtaaaaaggatatcttacgagtaattttattgaacaagttagaggcataagcttaagagcatttccatgaaacaacacatgcagcattccaggaacttgattgttaaattcaataagaaatttgctttattaatgaaactaagctgcatttcatcaaaaccttgtgacattcccttggtacataggacataaaacacagaggcattgctatttggtaagttaagcttctgtgattgtaattataaaagagcaacattgaccaaacctgggaaacaagagcacagtcttgtttggagagtctacataattactttgcactaacatttgcaggatgttcacacaattttaaattgtactgtatgtggctttttgaagtcttcccttgaccctagtaaaatatagcttgaaacttgtaaacaactgtgtttgccagaaacatcattcatgtgaactaggcaagttaccttttttccccccttcttttcctaattgtaaactaggccaacctgaaagccatggctgatgctctagccatcaggttctttcaaatgcatctttacactcttgcacaaaagttaaggaataaatgtccactgcttttggttttaaacttgttcaccttgtcttatctctcactgtcactgctcctccaccttggaacttgtgtgataaaacccaaaacctcttacagttctcttataagcatttcaagcatctcttattagcatccttgactttgcagaaaaggcttaactgttaacagttgtggggaaaggagttagaatttagcttaagcctaaaatcaccctgtattctcagtattatgggcaagtgggacttcatctttttttttttttttttttttttttaagagagggacagggtctcattctcttgcctaagctggagtgcagtcggagtcatgacagcacagctcactgcagcctcaaccttctaggctcgaacaatccccctacctcaacctcccaagttgctgggacttatggtacatgccaccacacctggctaatttttaaattttttttagagacaggagtctcactatgttgcccaagctggtcctgaactcctaggctcaagtgatcctcttgtctcagcctcccaaagtgctgggactagagacagccaccatacccagccttccatcaattattggcttgctattaactacatactgttgaccgtgggtcagttgcacagatcctgaaagctcattctgtatttgcctgtcatcttagagagcagccagcttattaccatttattagatcataatatggatattttcacaagagtgttcttaagtatttttaagtgccaaatgaaagccatcctccaggtgtgcaggtgccaattgaaggggtttggatggtcacaaacaacattaggcccttgaatggggtttggtcttgcccatttgagtatgaagcttctttggtccagtctgtgtatatgtgcctggccagaaagaaagcccagtgagagaagccacctttcccactcaccaaaaacaacaacaacaacaaaaaatccctcagggttgttttcatctggaccacattgctcttcacagaagtttctatgactttgtcgtatgtaaaatccagtctgtagcaaccttgattatcttggaaaagttacaggagaacgtcaagtgtatggtttccttttgtttgcttcttaatagcccaaagtactttgtcaagttaaagctggggcagtgtcttttggtaaaatgaagtcacttcagatacttatatgctttgctattggcgaatcagtagtcaaaggtatcattgtcctgcgagtttatgcactttgagtagtacagagacttggaaggagggcggtaggggtggggagagagaagttaggaaggtctgtgaagagaaggaaaaggtagttgtcagagagagaccctttctctacactaacctagcaatagaggccttctttttccacttccaactgctaaaatactctgctttctgaatcattcctctttgtttcaacaagttattttgagacctgggtagcttgtcaggagaaatggattatttctaaattatggctggaatgcctataaactgtcccttgtctgtaattaaggtgaaactctggctttgtctctgtgtgctgtatggcaccccttaactacccagggtaagttttgaagaggagaactctcagctgggccctgtggctcatgcctgtaatcccagcattttgggatgccaaggtgggcggatcacctgaggtcaggagttcaagaccagcctgaccaacatggaggaacctcgtgtctactaaaaacacaaaattagccgggcatggtggcacatgtctgtaatcccagctactcaggaggctgaggcaggagaatcgcttgaatccgggaggcggaggttgtggtgagccgagatcgcgccattgcactccagcctgggcgacaagagcaaaactcagtcttaaaaaaaaaacaaaaaaaactctcttctcattcccaggtcttcaggattataaacacatctttccttccttccaaatcaggagtaagcatttttattactcctacagaaaactgtaactagtgttaggaatccatctccttttgatttcctcattttccctttatgaaacactatttcaagtgatgggttattttggtgagtgatgttaggcaggagaaagcaggtttgttttttgttgttgttgtttggagacagagtctcactgtcgcccaggttggagtgtagtggtgcgatcttggctcactgcaacctccacctcccaagtttaagtgattttcctgcctcagcctcctgagtagctgagattataggcacatgccacccacgcctggctaatttttgtatttttagtagagacggtttcaccatgttgtccaggctggtcttgaactcctgacttcaggtgatctgcccaccttggcctcccaaagtgctgggattacaggcatgagccaccacacccagccaagaaagcagatttttaatatgaaaataactgaaggtagcaaactatttgcactatacatccagcaagaggaaatagacttcctttggggcactcctggagctagtcccttctattttccttttcttcccttcctttccctttctttctcttcctttccctcccttcccctgccctttgcctgcctgcctgcctgcctccctccctccttccccactttcctttttctttctttactttccttctttctctttttctttctctcttttctctttttttgtgtgtggttttttttttttttttttttttttttttgagagagggtctcacttttttgcccaggctagaatgcagtggtgcaaacatggctcactgcagcctcacactcctgagctcaagcagtccacccacctcggcctcccaaagtgctgggattacaggcatgagccacctcgcccagcctattttcttttatattgtgcatgcacttagatgaaaactggctttctccatcccacaaaaaccttctttaagtgtttccctggcactataaccttttttaatcaggactggtataagtggttgatattcaggcccctcagtatatttccagaccaatttctcagatgggcttagaaatagggaaatgagacgggatcacattgtcagggttactattcatgaagcaattccttcattgctggcatattttaccttagtcaatgtaaggagaaaagctcaatggttaggactaagtaagcctttaaggcctttgtcctctggctgaatgtataatacaatcaccaaccagctttgctctttctatgtctactcctggtctgggtaaggcaaaggcagacatttttgtgatgagcagtcacttttcattaaattaaactatttgtggatctttatctgatcagagacacagcgtaatctgcctcttagcagatgtaaaactatatgaataccttagtgccaagacagcagcttaatagttttccttgattgagtggtggtttgtgtgtttgttcttaacgtcctgtgtaagttgttattggtagaatggttttttccagagctgaggagcctgattgcccaacattgtactctgaaagcaaatggttgatcccatttggaaaagccaagaagaggccattgagtgtccagcccaggcctcctgtgactgctgtacaggaaagagcagcagcagccttggtgaatgtaccatgttcctttcccaacttctaaggatgcgaggagtgacaactgccattttcccaggcacacctctccctgccctgagccacttgttctcaattctgtttaaacttcctttttggtacttaaaaatcttaaatcttaaaaagatgtcacccttccctaaactttagagcctctggaaaatgtgagtggggagggtttggttttttgagttaaaacctagtcttcaaattgccagctttccttgggtttaaagttctccatagaaaatgagattgctttagaagctccaaagctcctgggccctctgacttggaggtttctagaaacaacccacaaatacaatctgacatttgggacgcagagccagcaccatcttgggtaagagaagtgttccatgtttgaggtagttggcaaatgctaagctacctatgtggtgacagttgtctggagcttttcccatctgattaaggggcaatactgatttggtcgttgtgggcagtttctcctcctagccagcatcactgccatcttggaaggtgtggctacctgtcatgtgttgcacagagagtcgaggggagctggcctcgtttgagagggcacctgagactttcagtcacctgctgcagagtgacagaaggaacaagggaaaccaaggctttcccaaacttgccagagaaggtgagctttttggaaggatggttccaagtgacctcagcttagtcctcctttggaggaaacaaggcaagttggggaggctctggtgcataacaagttatagggcaggtactgtttcctggattcaacctccaagcttcataaaaaggcagttccagccaggcgtggtggctcacgcctgtaatcccagcactttgggaggccgaggtaggtggatcacctgaggtcaggagttcaagaccagcctgagcaacatggagaaaccccgtctctactaaaaatacaaaattagccaggcgtggtggtgcatgcctgtaatcccagatacttgggaggctgaggcaggaaaatctcttgaaccggggatgtggaggttgcagtgaaccgagatccgagatcgcgccattgcatccagcctgggcaacaagagagaaactctgactcaaaaaaaaaaaaaaagggcggggggcacttccttttgaagtttcagatgtatattggagggagcagaattcctttgtgatttcttccttaatacattgtgtccctgaggtggtccctgttcttcctgtctcctgtcagccccctggctcagaggacggctgaatggagttgcatttcagtgcccacagatggaggtgatgactgaagtgtgtttgcttatgtggggagtgagatgatggctttggtgtctgagtggatgctagtgccttgagtggccagcagagggcagtggtgacccatagctgtgacaaccgtgaggcgtgtggtcagtgaatctgcatgggcacaacctgagaggggcttttgttggagtggggagattctttcggacttaagctttgtgcgtggtatatccagaatcagatgggccagtgccaagttcagtcaggttctcagccttacagtgaaggaaaaggttagtgacttgtatttcagcccaaagcctactggaagtgtcaagctgccagctcccctctgccctccccgttgctatggcagccatgtctctgtgtgtgaataggtgaaccaggctccaggttaggacctctgcccacctagctccaggttacatgcaggaaaagatctgtctattgctgcatgtgaacaaggagatcccatatttctagcaggtcacagaggcagcagtccattatcacttgcctgcccacctaccctgggcaaccagcacatggctccttagaccttgaagatggaggcctggggacagaaggagcagagttgggggctagtgatagggcctgggaaatgttcttgtctgtttcaagtttatcttgtattttggggccctggtctcctcagtcttccagcccaacaggtgtgagcgtccagggccrccacccggaagccagctgcctcttcatggggaaatctttgaaattcaaggcttggccatctggatatgcaaatgttccagatttgctgagcccaccaagtggctgagccccccatgcctggggcctgtcagccacattctccatggctccctccttctaacagggacaggggcaggcagggaatctaaattcccaggtcaaggagtttatttgggagccccaggcagggctgtgagaattagctaccactgcccctagatggggaaagctgcctgggtgctgttggtacctagaacctaagcttttgcctactgatagactctaaggag

SEQ ID NO: 95313 - DNA, 43006 bp, Homo sapiens
gttaattgcccaaaagactcaagattacttgggtgtcagttctcctaatgatttactgtgatcccaatctagatcccagaaggattcagtttgatttttaaagaaaatatcatatttatcctaaaacatgtatgaaaataaaaatgaatgtagaatattttaaaaactattttggaaaacaaatttatagcatttacagtatgtgattttaagattgtatacaaaactactgtaatcaagatatttcaatagaataatattcaaaaaggatttatttcaatgacgtatttcaataaggatagacagatagataataaaagacaatctagaaataaatccgtaactttggggtcaatttttaaagacaaaattgccaaagtaattcagttccaaaagtgtagtatatttttaaatggtgcttcaacatttgagtatccatataaaaaatccttaaccctgacctttatttcattccatatacaaaaattattaataatctcaaaatgaatcatggatgtaaatacaaaaaaaaaactttaaaacttctgggagaaaacataagagaaaaatctttgtaactttttattaggccaacatttcttagattagacatgggacagaaaaagcactaggcataaaagaaaagtagataaattggactttatcaaaattcaaactttgttcctattataagaagagatacaaaaaaagaaagcaacatttaaaaaggggttttaattctttattagagaggtatcttaatgccctcatagttaaagaaaattcatttattcaacaaatatgtatttaaaggctctggatttgggaccgtgcatgtagccatgatgcaagttcttgatgtctctttcgagaaagagaaagaaagggagttattaaaacatgataagttctttgatagaaatatatgtgtgagtgtatgggtacatagattagagttcggtctgttttgatgctctcttgagtgggctrtatacactagttcacatcctaaacctcatggcatttatgttttctaagccacaaagcttggcatattgagagaattagaaagaaaggtgaagacatcggctatttccttagccttgtgcaaacattcaaagtcatgacaaccagaggtagcagcatgacatagctaatttttttgtgctccttacttacagctttggaggccaatccattaggaaagcagccaatttgaacacttcttagtccacaattttctcctgcttcccatagcacaactgtgttgtatattgctgtgttgcaatattaagaatggtcttattttgccttattttgaatgtctatatgtgcacataacatgatttatgtcagtgttagccttgtgtttttctatagcaataaagattgctttagttaaatcttctttggtccatcaacaactaatgagaattcatttggtaaacagattgtttgaagtcccgccactttttctagataaggtgagaagattaaagggagtaaatgaaaccattttcaaaatggttttcactcttttatgtgatacttttcaatatccacagtgatagttccagttcataaacaaatttctgagttatttggaaagaaagataggtattaattaaaaagcttatatgaatttgataagaatgatatactctcaaattaaaaccactttctaagttttctaacttgagaaaagccttaatttgctattgaaaacacacttaaatcttaacctttaattgggtcaaacaataagatcctagggtttacttattatttaaattctgaaagtatttctacaaacactttggaaacttatctacaaatgtaaaattgaaagctataccattttctgccttagtaaagtttgtctgaatatgagtgaaactaaatatctgaaaaaagtcaagaatttggtacagcaagaagctctgatgtcagtatttttacattgttgttgcatatggtgttctgatatgccattattttacatagtacatattatccacaaaggaaagtgtgattcatgtgaacaaaggggaaagaaaaaccactgaaaactttctcttatctgtgtaaaagttgcactcctttaatccgtaaaattacacttagaactgatgatttatacattatttattttctccatttttagtagattaataatctataagaagtcagggaaaggattttgactttcattggtcattaggcgttaatatactacacttttgcaccgtacaatcttggccttttctatgctatcaaactttactgcatttctacatatttcaggtcagcagtttcagcagcattttttaaaacaggggacagattaagtcagatctatatcagcatgaatcatgtttgtgtccctttctcactgtaatgatgatattatgcagtgataaaattagtaactatattagcatttattgtggatctcctagatgccaagtgctatgcttaattctttgcattcattactaccttaacccaaacaacactcctattagatatgaattaacatatctttattataaatcaaattatgaatcaagaacattctaacaaacttccctttgatcacacagctggtaataatgtaagttgaaatcctcatcttgaaatggtaaacacaatatatacttattatggagtattgtttaaacggtaaatacctttattatatgggctttatggaaaggggtttatttagctttttgtaccttgttcttactcagagctccattttcttgattttaatcacaaagtaaacttttgattacattgaacttggactggccacaaagtgacgaatgcaaaagtgtttcctgctagaacttcagctgaagtctattgattttagcattctttctttgtattgttttttattttactcttcctccttgggattcagtaaataaatatggagagtagtaagatagaattcaatagagcatctactcagacagtgaaaatcattaagaaacaacctgctcaaaattgtaatgttttgaagagaaatctatctgtgatatatatctgctatacagatagattacatagattgattacataatagtaggaagacagatgatagatagatagatagacagacattacatagatttacacacacaaacacaagattggggagactcctgagaaagcttcctttatggtgtgggccagggagggaaatggcagctgctgcagaatggtggcagaagtccattgggatccttgtcctctatctctcttaagaaataaaaccctaacatgcaggagtgaaggacaccaataaagctgtcctacggcactggtgaaaatacatcacagttggcagaagggaataaaaaacagcaacaacaatgacaacaacaaaaccttctatgccatgaggaggagcagcatctgaaatgagaatattatagttaagaaaataaccttaagctgggcacagtggctcatgcctgtaatcccagcactttgggaggccgaggccagtggatcatctgyggtcaggagtttgagaccaacccggccaacatggtgaaaccccgtctctactaaaaatacaaaaattagccaggcatggtggcacatgcctggaatcccagctactggggaggctgaggcaggagaattgcttgaacccaggaagtggaggctgcagtgagccgaaatggcaccattgcactccagcctggatgacaagagcaaaactccatctcaaaaaacaaacaaaaaaaccccccaaaaaaccaaaaaacaaaatcttaaaagttaggcttaatattcacgtatctgttttatgattgatacatagtatttatggggtacatgtgatatattgtggcatgcgagaaaggtttgcttttggatgagattgaaatcatagctcactatttatcgcttactgaaaactagatgcccttgtaatacagatgagtccaaatgactacacacaattggtttaaacaagccccaaagatcctgattcatcaggaaagaatctttggttggattcatgtcaggattagcaggattacttaaaggtcctggttctttaagaggatagtgtcagaagaattatagtgaaacacagcattaaattttgattctctcctgggcaagtgctgctgtaaattgaaatgtttccgtttatatcatccactctccatgcaaaaattttcctgacaacacagaaaaaggtggttatccaaattgttttcttgcctttctagaacacagaaccatgttaaagaaagagtaagacttggctgtgcgcagtagctcacgtaatcccagcactttgggaggccaaggcaggaggattgcttgaacccaggaattcaagaccaacctcagcaacaaagcaaggcctcatcactacagataatttctttaaaaaaattagctgggaatgatggcacacacctgtggtcccagatactcaggaggatgaggtgggaggacccctggagcctaggcggtagaggctacaaagaggtatgattccaccactgcactccagtactccagcctgggcaacagagaaacaccccctctaatacaaaagaaaagaaaagaaaaggggaggggaggggaggggagagaaacaccccctctaagaaaagaaaagaaaagggggggaaaggggaggggaggggaggggggaggggaggggaggagagggggaggggaggggaggggggaggggaggggaggggaagggaagggaagggaagggaagggaagggagaaaagaaaaagacgagtgaatcttacattaaagacagcagaatagcagaagaagcttaaggacacatcaaggactccttcatttcttatcaagtaccttgatattcaacaacatatcaggtgaggtcatatattaactaagatagaatatgaaagatcaagaagttatatagattacaaggtatatttttaaagcctactttagtgccttttatattacaaagtcctttatttttcttatctaccagtcagcctttctaagacatgactcaaagtttcttttgcaacaaggttttccattattcactacaaaccactccaatcagtacttaagatactcaatttgcccataattacttggcttttattaaagatgaaataaagttaattatttaaaatatatcagaaccttttaatgaatcagtttgtttttctctccactggggggatgtgcttctactatattttccagaatatctgataattaacatgcttttcttcaagtcggtgggcaagaggcctctgtctggtgacgatctgaagatatgataatgctggcagtttggacagaagttgctagaagtgagtatttcttttttctcagtgctcactggaatttgtactgttattagtaaaacttgatacaacatgacaatctgttttgctaataagaactctctgggatagaaagttagataattgttttgggtgggagttttccaatgtctatttaatttcaggcattgatataaactataatgctgtcttattgaagaaacagatttacaaaaggggaagaaattcttttgctttctgatattgggagtcctcatagcatattgtatctatacactcctctcagataatgtaggaaccatggaaaatactgctgctaaatgctgttatggaaagtcgtcatattcggtaagtgaaaaattttattgatcaagaaagacaagttttctaggattctagttgtttttctttttacaaattaagttttatatgtacttggtttcttattgccaaatgttactggcttctttattgtatccctgaatgatcctaaagtataccactaacaagatgaacaaggtgatatttggattatatttacaataaaaatgacctattctaatagcagtaaagtcataaaatatacaataattttaaaacattcttctacttaggtatgatttttaaatttcatacaacactcagaagtcatatgtttgagctactctgtgacatttaatcattaatagaagatttggggtatacactacagatgggtaagttcttatgaaaatatactatagcttcactgactggaaaatgcrtagaaactatgagagatgtggttagtagttttggaagaatgtttctctctctactatgactatttcattgagaacctgacccagtctatctcctcaaaccttcttgctacaaaattaactctctatctcagtctctctctttctgtatgtgtatgtaaacacagttatatatatgtgtgtgtgtgtatatgcatgtgtgtataaatatgtgtatgtgtgtgtacatatatgtatatatagcaatgtatagagagagtaaaaagtttaactgtaacaagtaggaattgtttggtggtagacattagaaactgctggatcttcacaggaagaggtctttgatcttaacatccacaattccaagaatggagagcgcattactttcttatgtacccactccttgtttccgagataatttaaagcaaattttatgttttaaatagtaatacatttaaatagttgaaaatcaaagcaatatgaaaaaaagtacacaatgacacatcctgctcccatgttctaactttattcatcctattctcaacccagtcgtctatagatcatcagtcttattagcttcttgtgacccatcctgggtattctgcatacaagtaatactagtaataatgaatacagataatagaaaaatatattcttatccttctttctttctttcttacataagaaacaacatcacatgtatgctattatggtctttacattttcatttaattatacatcctagagatgtttctacacctttacatacaaattgtcctcattcttttacatagtggcataggaatcaatatctgtataaaccatagtttatttaatcagatctgttcagatgaaaacttttgttctttccaatgttttgtcattacaaacaataaaatggtatttgatatggtttggctatgttcccacccaaatctcattttgaattgtagttcccacaattcccacgtgttgtgcaaggaacccagtgggagttaattgaatcatggaggtctttcctatgctgttctaatgatagtgactaagtctcacaaaatctgatggtttttataaaggggagttcccctgcacaaactctatctttcctgctgccacgtaagacatcccttgctcttctgccatgattgtgaggcctccccagccatgtggaactatgagtcagttaaaactctttcctttataaatcacccagtctcagatatgtctttattagcagcatgagaacagatgaatacagtattatataataacatttaatttggaggctagattttatcaataaataatctatgaagtgggattgttgggtcaattgtaattttgctactctttgcaaaattgtcctttaataatttcaactcctacaaacaaggcatgagtatgtctttgtcctgtcagcttctcaatgaagtgtcttatgatttttctggatttcatttccctaatataaatgagaagtggtatcttagtataatttaattttatacatcacttattaagttttttaatcttttatgtttgagacatttgcatttattttcctttgaactccaagaagcttctttgtccaattttaatcaggtttttgttttttttttaaatttctttctatattaggaaaatacaattttttcccagtttgtcttctgtcattattaaaataattggccatgatgaagtaatttttttactactcttcatttttaaatcaaaatttattggtcttttaaattatgtcttctaaaatttgattcatagctgagaagtttatctccactctaagactatagaagaattcccctttagtctcttctggggctttcctggcttcttttttatgttcaaatctttgcttcagttggaatttatgttgataagtagtgagaagtttagaytgaacttttacttttctccaattttctatcccagtcccatttattggaaagtcccttgtgatttaagatcatataaaagattcatgcaagtcaggcatctaagaaaaagctgaaaggaaattcttcccccataatctaggagacttaattagataaagacaggcatggagagaatagcatagcattttctttccaagaaaaatggtggtggtccattcaatattaaggagcagatttcccttaaatgcacaagtggccaaaaatgagggtgaaaatggcatttctgagcactgtcctcaaaatactagaaaaccacagcagccyaccatgaacctggagcttggatatttttttcttttatttaaagtttcacttgcattaaaaaaaaagaattcacccagtcaggtaatgtcaatgactttcaaacttttagctgtgataaagttttcaaaattgttcagggaaatacttttggaatttaaatagtaatcaaaatctagattttgggtggccctaataagtactgatgattaattatgttttcagtagcaagtcaagactcttctcaagcatttggaaacttattttggtttggatttatatttttattgccaaatttgagcttctcagtacatatctttctttctaggaatactggaatctgctcacaaacttggagtatcaggttttggtatatctgacattatggtcactgaatagttctcactgaatagagaggcaagaaatacgttgtacctcacctaagtaaaatagcctgactcataaaagtactatgtatgaaatgcactgttatgggatattgagaatcagaggccaccaaataaacctacctttattgcygcagaaaaacactaaccctgctaagccagcactaaaactgctgtaaatcaatacagcatattatcatagctatttgaatttaaaacagtattgacagcacacaccacagcacttctcactagcagggctatctattattgaagaagaggagaaaagagttgtggaccgggaaaggaccaatttgcctgctaacttcataacaggacaccaaagctattagtaagggtgcccctagactctgcctaaagagctcagagaatagaaactttctcttccacatttaatcctttaagctgagttacaatgctactactgtgtgctgtctgggaatgcttacacaacactaaggaaatatctgatgtcttcgcctttgtaactactagctctattgcagttttttgagtacactgatattcatgacatgggctcacatatttgttcttttagggaagcatcataatagtctagcctcctcctctgtacaaccatattatccaatgtgcatataaaagtgcatatcagagttggctacataatttgtggagggcagagcaaaataaaaataaagaaaaccttattcaaaaggcagatttaaagatgcagttaaaaatattaaaacataaagacttttctttaaaaagacatttattatttataaactgtaataggagtaatagtgacatgaatatgacataaagttacaaattgcaaaagcatgtttatcattttatataatacaatgaataacaacaatttatcaatgtgatatatggattgatcataagatttttctggcccacttttttgtaaatttatcattcaaattaaattttttagcctcattttcttttcttttttttttttttttctttgagacagagtcttgctctgtcgcctaggctggagtgcagtggtgtgatatcggctcactgcaacctccgcctcccgggttcaagcaattctcctgcctcagcctcccgagtacctgggactacaggcgcacgccaccacacctggctaattttttgtattttagtagaaatgaggtttcgccacgttgcccaggctggtctcaaactgctgagctcaggcaatgcgcctgcctcagcctcccaaagtgctaggattacaggcatgagagctaccgcgcccagctcattttcaattgacataattgaaagtgaagtcagctgttctccacaaatgcaagactgaaattaagttttgatgatttttaattttgagaaggctcattcttctgatacaactgttagtagaactgggaagagtattttatggactgtgacaacattgggatacatttctgataacatttaaaatataaatttcagtacatctggagttgattcctttgaaagaattctttaaaaaakatttaactcttgatgtaatgggttttataaaagtttgaattaattttaaatgtacaatttgtaccatgaaatgttaatatttgctctgatattacctataacttgtggaggctgtacaagaaactgaattttctatatgcctactgttttctgcatacttgctctaattatagaataataattaaaaggagactattattctaataataataacctattattagaccatgtaagaattaatgagataggagtgttaatcgccaactaataatttttttttttttgagacagagtcttgcactgtcgcccaggctggagtgcagtggcacgatcttggctcactgcaagctctgcctcctgggttcacgccattctcctgcctcagcctcccgagtagctgggactacagacgcctgccaccacacctggctaattttttgtaattttggtagagatggcrtttcaccatgttagccatgatggtctcgatctcctgaccaggtgatccacccgcctctgcctcccaaagtgctgggattacaggcatgagccatcacacctggcctcatcattttaataatatttggagactggagaggatgctaaaacagtgcttattttaccatcttgttttataggtatttctttttgaaatatatacttgaaaaatgaataggtttttttctttgaaatctcaataactagaccttccatgaaaaaactgtagaagtttttcatctactttattgagtttttggtctattccttctttgtatgagtttgttatacattctatatactaatattttcatattttcttatttgtatgtattacaaatatcattgtccacattgtagcttgtcttttctttcttttttctgtctttttttttttttttttttttgagatggagtcttgctctgtcgcccaggctggagtgcagtgatgcaatcttggctcactggaacttctgcctcctgggttcaagcgattctcctgacttagcctcccaaatagctgggattataggtgcccaccaacgcacttggctaatttttgtatttttcgtagagacagggtttcaccatgttggccagactggtctagaactcctgacctcaactgatctgcctagacctcccaaagtgctggagttacaggcacgagccaccatacccggtcatagcttgtcttttcaatcactttataggatagtttgattaacataaattcttaatcttaactaactcaatttttcaatatttctatcacggcttttgatggttgcctttgttttttccttaatgtgtgtgtgttttattaaatttttcttaaggattctctcttcttacccactgtcatacacccagaagtatagggataacagaagaccygcacttctcactttctatatttttgtttttctctaggctaagctcatttaatctgcctgagaggccttctgctaagtttgttgtccaaactctactttcctttcaagttccagtttaactccaagttgaaattcttttccttctcttacgtctttatgattatcccaaataactttgtctatatctatggtaagaccttgttttgtcaktcatgtctctcatttggctctgacgtttttgttggtggtggttttgttttgttttaggatgatgaatttacctgattctgcttggtcttcacagtatttcgcacagattatagacccatatggtattcctattgagtgatgcataaatgaggattcatttcacttagaataattcttattttacaatatttgaacttctgtatcttcaggtgatatcatttttctgagagtatgtaatttaagaccattgggatcataacagatattaatgtgcacttctttattcaaaaatatttttgacacttagaatgtgtgtgtatgtgtatgtgttttattttaggccctgtttgctgaaatgttggggccaaacaacttgatagagcctatgatgttcctttcaagctttctaaagtttccaccaacctcagatgaaaatgtaactgtgagaagtaaatttaacaacattgttgtctgcatatgtgtgccaaaatggaagacagaatcatgaaaaagaagcttattttataaccatggtggtggctcatgtttgagtagtaatggtaagtatcaattggtggaaaatttatttaatacaattttgatattactttgactactcttttatcataatctacaaattaaatatcatgttcctgcttcctaagtttatgagtcaggctattttacttaggtgaggtacaacgtatttcttgcctctctattcagtgagaactattcagtgaccataatgtcagatataccaaaacctgatastccaagtttgtgagcagattccagtattcctagaaagaaagatatgtactgagaagcaacataaattaattgaatttttgaaatttcaatctaatatgtactgagaagctcaaatttggcaataaaaatataaatccaaaccaaaataagtttccaaatgcttgagaagagtcttgacttgctactgaaaacataattaatcatcagtacttaataagtactttgaaatattttaatagttttttaccctacctaagagtttctgacccttccattcactgacagaacttagaaatttcacagatttaccaagctcctttgtgagcttgccaacatactgttgcattgtgagcttgccaacatactgctggaaatgacttatttttccttcacagctcaaataaatagttcttttccaaatatgcttttctcgtgtccccaaatagaggtaggaaaactgcagagtttccatatactaaagttaaatattggctgggtgtgatggctcatgtctataaccccagcactttgggaggccaatgtggaagcatcacttgaggccaggaatttgagaccaatctaggcacaatagtgagacccagtctataaaataaagaaaaataaacaattgaatattaaagcatagcttgctttctttgaattgtttcatgcttaacattataggattaaataatgggttgtctcttcctttcaattttttctccaacaatattattatcctttccaagatcaaaatgtactccaggaaaaatgcttcagttctcatgtttaataaagtagctagtattttttttttcatgtggaatatttcaatgaacaagacaatagattaaatgtagaaagactgttcaaggctcaaggtccagggtgctgggagtatggcctagaagggaatggacatgcccccttgctctgctagtcctacagtgaagccagcaatcagaggaagaccagacagtccttttaagtgtaggggcttgggatggaggcctcaattgcctagatttaaggagggttctgattgccagtgttacaggtttgggcttagagagtgctgacgtgaagcaacttgcaaatggtgaagagggagggtacactcttaggtgactgagaagggttagagatctatgtgaagccaagagaggagaatatcaggaaagaggatggacttattaattttcctttttgcatataaatgttttataattttatacaacagaacgtaagatttcagtaatgtaaaatgaaaatgaaatgttaacttgaaaaactatataaacttgcaaaagtaatgaaatcaagacaatcttgtagtattaaatttaaacatcattttaaactcatattttcaaaatctatcttttctagctctgcaaactaagatggcttagtaccaatgagtacatataaagccaagatttttttctctaacatttaccactaaaggaaaccatgactccttgaagaaattatttactctaggattcagctaggaaagatttacatatgtataaaaaaagttatgacagtaaatataggaaggtgtcaacatcagtgagcttagcaatgtaggaatgtgatttattattattgttagggttcacccaagtgtactgtttccccctcccatagacctaagccccaaaggccaaaagtaaaacctcctaccccaaacccgcctgtaactgtctgaccagttcccggatgcagtcaagacgtctaycttacacaacagaactggcaagaaaaacatccccaggaagcggtcagacacctggcacaaaggaccctacaactcttttctttttccttcaccttgacccagttctacaccctataaaaccttgctatagcctgtaagcggggctgcctcctctgcttttgtcaggaggtagcccggcaggactgacaataaatcagcttgcctgaacttaggtctattggcctcattcctttctcggctgtccttccaattatcccttgtatcttggtgccgaaacccggcaaggtggtagagctcggcctccctttctccctctctcctttcctccccgcttcccccggccaaactcccccttccagaacgtgctggagacccagaggatttcctactcctttccattgctggcagacacatccaacaccagggccacctcaggggtgagtaaaggagacttctgccttctgtccggaacccttgtccactctttccttcccaaaagatgcagcactgggccaagagttttctcctcccagcctccaggcccttggtatctgcctttcacggatgcttgaatggggaattatcgcacctctccgactcaggggacgccttctcctatcattctagtctctggccacgtctctcatctccatctgttcctcattcattctatcatgggagcctctcagtccagtccctcaaagacatctcccctccgatgtctcctccggaatcttaatgcccttggcctccattccgaaattcgaccacaaaggctcatctttcattgtaacacagcctggcctcagtataaattggacaatggctcccagtggcctgaaaatggcacattcgattttaacatcctcagggacctagacaacttttgccatcgcaatggaaagtggtctgaaatcccttatgttcaggccttttttgccctccatagctgcccctccctttatcggtcctgtttcactttccaaatcctcctcgcccgctccaagccaggctcaccctcagctccccttccttctggcgattcctcctcctttgaccctgccgacgtctccccctgcccctcccagtcaacataataatgctccgcccaatcaccacgaccctccgccctatgctccagctcctgccctccctcttccccccctctccaaccacccagcttctgactctgattcatccgcatctccacctcatactccacctcatacgctctcaaactcagcatgcccaacaaccagcccccatacttcccctccgagaggtggctggagccgaagacatcattcgagtccacgttcccttctccctctctgacctctcccaaattgcaaaacgtctcgggtcgttttcctctgatcccracacttatatcaaagaatttaagtaccttacccaatcttatgaactcacttggcatgatctctacattatcctctcttctaccctccttccagaaaagaaggaaagagtgtggcttgcagcacaggcacatgccaacgatcttcatcggcaagaccctactaagcccataggggctgctgcagttcccctggaggaacccccctggaagtaccaacccacagaccctggccgggcatctcgtaaccatatgattacttgcctcatcgcaggacttaacaaagcagcccataaggccgtaaattttgaaaagctcaaagaaatctcccaaagagccgatgaaaatcctgctgaatttctttctcgttttacagaggccctccaaaaatatactcgtgtagaccccacctcccgggaagaaactatcgttcttaataaccatttcatctctcagtctgctcctaacatacagcacaaactgaaaaaggccgaagatggccctcaaactccacaacaagatctccttaacctgactttcaaagtcttcaataacagggaggagcagattaaattagacaaggcccaaagagattgtgctaaataccagcttctggcagtggctatccatcaacctagccatagtacccaagggcacaaaaaacccaatggcagtaaccctcctgggccttgttttaagtgcagcaaagaaggtcactgggcgtgggaatgtcctaacccaaggacaccaaaaactccttgcccagcctgccaacagaccagccactggaagtctgattgtcctcttaaaaaccaggctaacagaccaactcctcaaagccctggcaaggcagagagtgaaagatcactcatcctaccgcagctccttggtctggccactgaagaatgacagagcccagggcccccggtcccatctgccatcactgctttggagcccagggtaactctgccagtaacaggtaagctgatctcctttttaattgataccagggccacctacttggctttgcctgaattttcaggacccattcatccctctcaggtctctgtcatgggggttgatggattcgtctctcatccacacgccactgagtcccttacttgttccttgtttaatactattttttcacactccttccttatcatggctcattgtcccacccccattctaggccgagaccttttagctaaattcaaagattccatcactttctcctgtgtctctcaaccagagtcctttctgctcctctctgctagtccagcccctgacccttctccccactacccacttctctcctctctcattaacccagtggtgtgggataccaccacctcttctattgcaggatctggccagcagcccacaatgcaacagggctctttctttgttcccaggcggattggcatgttgagaaataatagacacacacaagatagtgaaagccaggtctaggggggtcaccgccttctggtcctgcagtgccaacaatgcactggatataccagcatttattattaagtttagtgaaggtgggggtaggttactgagggatttaggggcatttgattatgagatgagatggtcacatggggatgaagtaattctttaacataacatctgtatgcagaagtacagtatacagagataagaatttacaatatagtgtgtgcatcagtaattcttaacagagccttaaaacagaaacatagcctttccataacctatgattagccagatattaatcagcagtaacagttgcagcaaaagctggttacaaacaatccatagaaacaggacgtaaaggtagacaacyggttagaccagatattctcagaagggagtatgccttaaccctaaagaggcctagaagagctgtggcaagatgagggcagttatagccctatcttaccatatggacaggtgcccctcatgcatccgtttataggctctccacaaggctcacattccattcccagagctatgaacatctgcttttctggaataggattcttggtgatgtgaaacctccctgactgcaagtccrttcataggctttctgcatggggaagcacatcacgcactattggctcattctggcagtccaacctggcattgtctttacacaatcctgaatgcaattttgtatttacaataatcaggggcatttcgtcttttattccatagcaatagtttcagggggtctccctacactcttccatagctgcacaccataaccccatcaaaatccagttaaaggacccctccaaatttcctaacgttccccaataccctatctccctaacccaccaaaaggtcctccaacccattataaacaagctgtactcatgtgatcttcttagaccaacacattctccatataacacccccttcctccctgttagaaaatctgacagctcataccgactcgttcaggacctctgagccatcaatcaggctgtactccctatttaccccttggtccctaacccctgtacacttctctccctcatcccttccaacaccacccactatacagcaatcgacctacaggatgctttcttcaccattcccttacactctaattcccaagacctcttcaccttcacctggacagatcctgacactcttcagtcacaactcacatggactgtcctccctcaaggcttcagatacagccctcacatctttggacaagctctagcccaagaccacaccaccttaaacccctcccccagctgcctcctccaatacattgatgacctccttctttgcagcccctccctagaggactccaaactcacaccatcaccctactaaactctctttctagcaaaagatatagggtctccccctccaaagcccaactatctgccccaacagtaacatacttaggagtccaactctcccctggggcccaagccatgaccccagcacaagcaaccttaataaacagcttgcytctgccttcctcaaaaaatgaaattctctctttcttaagactagaaggtttctttagaatatggattcccaactttgccctcctggctcaacccctctacgaagcagccaaaggccccctcaatgaacccctaagccccatacacaacatacttcccagtttctgtaaactccaaactgctctcatcactgcacctgccctgtccttacccgacctctcccaaccctttgttctctataccaccaaaaatcaaggaatagctcttggggtcttagggcaacaaaagggaaatcctccttcctttgaccctgtagcatatctctgtaaacaactagacaacactgtcaaagggcagccaacctgtcttaaagcatcatcagcagtggccgttttgcctctggaaagcaaaaaactaacatttggccaaagcaccaccattcacagccctcacaacttacaggatctcctctcctcctgggcattaagctccctctctccttcccaaattcagtcgctctaygccctctttatcaaaaatcctgaattcagccttgccaaaagtgcccccctcaacctggcatccctacttcccatatcctcttcccctcctactcattcttgcactgacattctggatcacttgcagccacamttccctaacatctcctccaagcctctcactaatccagatgaccaactatttatagatgactcctcttccagagcccccggctctcccaaaattgttgggtatgcagtagttaccttaaaccatgtaattgaggctaaacccctacccccagaaacctcctcccagaaagcagaactcagctctcacaagagccctaaccctctccaaggacaaacaggtcaacatatacacagactccaagtatgcctaccacattcttcattctcatgccgccatctggtaagagaaaaaattccttactgccaaaggaaccctcattactaatggcccccttatttaccaactccttcaggctgcacacctcccaactgaagcaggagtcatacactgtcgaggacagtaagcaggttcagatgaaatctcaagaggaaataggctgatgagcaccgaaacaggcctctctttctcctatccctgcccccatcctccttgtcaccccagcagtccaacccagatactctcccaccaaaaactcttcactactacagcaaggagcctcccttcaaggggactggataatcaaaaaccaaaagctcattcttccccaagagcaaaccaaggaaattccaacatctcttcaccaatccttccatatcagtgggcgccccctgtacctactccttcacccttatttctcctccccccatctattcacctcactaaaggacataacctcaaactgtcatatatgctctgttacttcctcccaaggggccctccgccctctcctcatccctacacatcagctcagaggaacactcccaggggaggactggcaagtagacttcacccacatgcctcctgtcaaaaaaactaaatattttcttactctcatagacactttttcaggttgggtagaagcatttcctaccccttcagaaaaatctctcaaattctcataacaaaaatcatccctagatttggtctcccttgttccatacaatcagataatgggcctagcttcatctcccaaattacccaacaagtctctcaatcccttggtgttcagtggtgcctccatatcccataccagccccagtcatctggaaaagtccaaagggcaaatggaattctcaaaactcagttaaccaaactcacacttgaggttaaaaaaccttagacctccattttacccatagcactggctcatatcagagccagtccaaaggccccctccttcctcagtccattcgacttaatgtatggatgccctttcctcttacaaaacagaccccctcctgagtatcaattagaatamctcccaacactctccctcatccatcatctcctctgcgaacaagctgaccaggcccccacaaaaccccaccaaggcaccactgaccaaacactccttccaggagaatatgtcttcctaaaaaycaacaagtctcatgccaaagtgcgaaatccctttccaagtccttctcgctacctccactgcagccaaactttgagaacacaagtcttggtaccatctttccaggttaaaaagagcacctgcagctgacccatcaccaactaaccaaccagctgttccctgcaaatactccagcactcttctcagaccaattcgactccgcctaacgcccatgcctgaagaccccactcttccctcatgaaccatagcagataagttatcaccccttaccattaagtatccaaacccttattaatggaaatcatccattacgctgcccttgcakgaatcaccctacttactctactctttgccataggaatatatactgtcttgcctcctgggtggaatttcagacaaaaaaaactcaatattcgtaacctcttgcctcataatcctcctcatagcaggtataatagccaccaccaacagatagtggcccctcctaaatgtcctgtctttgcccatcctggcatttcacactcttccttcactgcatcacagaaaacctttcatggtcctacccagaacatcccaccctcacagcattccttgattggatcaccaatcttatatttcaaggggatttacaggaattcactccagatgaagccgaattctttacctttacacttgctctctgtctatttactccttcttccctcctccttctcgctaccgctccacctacagcgcaccattccacaggcacatatgatactcagtcaaactaacccctccctggccaaggcctgctggtacacccctcagaaaccgtatcaaaagatgtcttcccagctcccctcaaagactgggttctcagcaatatgaccctccacccccgctaccaaagttttggagaagtaaatgcactcaaaagttacaaactcaatcttaccacacatactgcagaacacaaggttatcttaggaacacttaccccagactcagaactcagtcaaccagcatccctatgcataaagcgtgaactttccaaaggagtgcccctaggcaccctctcctctagcttatgcaactgtaccctaacactcactcccccgacaggcatccaaacaataacagaaaaaaaccccacacaaactctcaaaatctccaacccccgtcagacccaagtcacgggagaaacatcaggattctgcaataactgacacaggccctgcatagaaatcgcagggtggarcacttgcctaaaccccgtccccacttcccaatgcatggaaatcccactgcctaacacaccctcaaacaaactacttattgacacaaaacgcttcttatggactcagcctgggtgacagaggaagattctgtatcaaaaaawatatatatatacacacacacayatatatgtrtatatatgtgtgtgtgtatatatataatttgttttttccatgataagctattttaaaacaaagattctgaattctgtatgttttctatggataattttgttagagttaaagaatttgttcccgagttattactcaatacatgctgtttattggaatacagataacagcatgatcattgacaaactttgccctagtttcctattactcattaaaccttgaagttgcacttaacatgactgtatctggataacagataaaattttggccttattatgccaacccttaaactaagtgagcaactctgttttcaaagcttttgggtggagctgaagcacactgcttattaaagtacactattcaggyatatcatgtaggtttactttctgtgtttctagagaccaagaagcgggacgttcaccatgggaagaaaatcgctgtaccttctgattgtggggatmctcatagcatattatatttatacgcctctcccagataacgttgaggagccatggagaatgatgtggataaacgcacatctgaaaactatacaaaatttggtaagtttggaattttatgaattcagatgtgcatacaccaccatttgacccagagaattaagtttttcaagattctattcttttgatttattgacttattcatcttttaaaataactgctgtggcctttgacaatgtrttayttagaaatgttgtttgttttctgtcttatgtattggaatcatgttaaaaaaatatcaagaacagcaagcaaggagtcatttgaataggttttgctaaaaagtactttgtttaggtagctttaatatcacgatagtggctctcctttgaaattcttatcttaggtatggtttgttccttaaattttatactcaaattagagatcatctgattatgcagcactgtgttagttacagatttttatgcacttatctttgggattcagaatatagactaaggacacgtaaataagttctcaagaaaagattcaatgggcaggctggttggcacatgcctagggttaaccacgagacggcacaatatgcacaaatgagagggggagggagacctgggtgtcctggcaactgggcagcttggatgctggcaaattaaaaaggtgtagctctctctggatccttgatgatattttactattacttctttggttattttattatcttcattaaaacaaatctcttttcagaacttaaaccagataaatgttgtaactcctggattaatcttttattttgcatttattcaacaattcaactgtctcaaatcctattaggcaaacaagtagtctatccccacacagttgacattctagtggtggagaaaaaaataaattagaattaaatgaataaatgattttagttcatgagaagtacctttaaggaggtaagatggaagaaaagagagtaatttgggcagaaggcaagagtgggctactgtatgcatggtgagaaaaagccattctgaagaggaaacagctacttagggaccagaagaatgaaaagaaaccaaccattctaagtgctaagaaaaatgttttccagcagagacaccaacargtaaaaacaccccagctacagaatattgacaagtccaagaaatcatatgaaacatttgggtttaatggggaaattgttgcaattagtttggagaggttagaagccatatcatacagtgctttgtgggcactggtagtaagttttgatttaattctgtatgtgatgcagagctattaaagagctttaagaaagggacacatttttttccctcatatttgcygtctgtgctacaatatgtgagaggtctttgatttttttcttggagtctttatattaatttttatttatttaagcaattatatatatattcttctctggtagccttttaattarttmattcattcatttacttacattctgtccacaatttatgaaagtaatgtattttcagagctctcagtcgatataccttttaaaagttgttttaatgccctttcttattcctgaattatctgcttgtttgtttgcttgcttttttgtgatcgtttatgctcctggtttgtcccttttttcctgattagttttgctggcttctctgaaatgtctggcaatctttgagtgttcataccctttattaaaggattatgttatgaacattacatcaagaatcaaactactggattgagaatcctggtaaatatcatttactagttgtgtaggcatggacgacatatttaaccttcctgggctcactttcctcatatctgacatggataagaaaatgttatcttcctcccatataagcaagttgttaatattactgagatgactacaatagagtgctcagaacactgactcattctacagtgaaaggatgggctgcaggcaggcaagctgccctccctttttctcccactcattccttccctcccaaccctgactcccagctcccatgtgcaaccagctccatagccacacctcactgcacctccctatttctaaactaaaccagttcctcgacctgccagggtttttccttttcttatttggttagcaaaagacttaggaaaaggtatttatttcaagcctcagacaaaattgcttttccagtttctactcccaagtagctttttgtaatcacctgctgttcgctcccaaagtactttgtacagagctctgtaatagtatttacattgttttgtaaccatttatttgtctttcacacttaactctgagattcttgagaagagcatttgtctggttcatctctgaaaccgtaaagcttggtagagagcctgacacattttagtgacataggaactaaattagtagcaggggtcacaataaaacttcatctttgccctctgaaagttgctgaaagtcaactgacaggtctggttaatagaagaaaaaggcatatacatttttagcatacataatagacttacaaaatataaaatctcaaagaaatggccagatggttgacactttttttttactatcttgaggttacagaaagaatggtggmttggccaaaaaatgatatggtggcaagacaggttatgggaaggagagaagaggagacatggttagcaaaagtggtcttgttatatagatggatcctcacaggtagcagccctcagagagaacagatggtaaaaatttctttcagacttttaaaggtgtcagattctcagttgatttttcctagatctggacaaatgaaggctctcagaagccatcaatgcagattttctctacagatgcaaatcacctccacaaaagaaaagctttccagctaatcttgtatttccagcccttctgaaaagctaccttgcattatgtcaaggagatatattttgggatgaaatatttttatttccttcacagtgtattccctcttttttaagaaccaccctaggcataacctttgcatttctggtttcttttaaaaggaccaagcrggattcatgcatgaaaatttagttcattccatttgagtttattwagggttaatgtctacctataagtccatagatctctttgccatttgatacttgaatttcaggaggtttgtgaatttcatttttaggctacatttgtggagctcctgggacttcaccattttatggattcctttaaggttgtcgggagctttgatgaagtcccaccaacctcagatgaaaatgtcactgtgactgagacaaaattcaacaacattcttgttcgggtatatgtgccaaagagaaagtctgaagcactaagaagggggttgttttacatccatggtggaggctggtgcgtgggaagtgctggtaagtgaatgctttgaaaaatctctgtcactgaggtagttcgcaracattttactaagtcttcagtaggtacacatgcccttcggcatggacattactgcctcttttatcttctcgtgctttgttctgkcaaagttttacttttccctgaagctttatatcactcttttccacatatgcatttcctcatcaacccaggtagaggtgagaagaaactttttttttctatttatcacaattactctaagaaagccttgttatttctatcattctccacttgatattacagaaccatttaatgttttcatccatttactcatatttactatatgtctggtaatatttttatatctttgaatatatttttgaattgacaaaatttcctcacgcctgtaatcccagcactttgggaggccaaggcgggtggataacttgaggtcaggagtttgagaccagcctggccaacatggtgaaaccctgtatctactaaaacaatacaaaaattagccgggtgtggtggcgggcacacattatcccagctactcggggggctgaggcaggataatcacttgaacccaggaggcggaggtcgcagtgagccaagattgcaccgttgcactccagcctgggcaacagagcaagactctgcctcaaaaaaaaaaaaaaagaaaaaaatcctgtcttcctgtattcttggatcttacattctaatggagacaatctttratcgataaataagtaaataatacagtgtgttttaaagtgataaatgtaggaaataataggccagaatgttagaagaaaaaccttagacaaattaaatttaacagagtttaattgagcaaagaactacttgtggatcaggcaccctcctgaaccagaataggttcagagagtcaccagcgctgcctcctggtcgaagaagagttataggtagaaaaaggaaagtgacattcagaaaacagaagtgaggcacagaaataggcggattggttacagctcagcgtttgccttatttgaaactggttccacaagttggttacctttggctgaaactcagtgattgggacaagagtagrttacacatccaattaagttacaactcactgtgtatcaagaaacctttaaaatatgcaaagaggcagctttaggctaaacttagtttatttggcaagagtaatcaagattgggtgtgaaggttgtatatttcttgatgtatagaattacagcagaaagacaaaaacatttagaagtggaagcactgggataaaagtcccaattatgtgagaaaatcacctaacccacctgagtcctagggctcttgagattcatctgtttacctccaatgaatacagtatagattaactggaggagtgaagattggactggrcctactaagttaagaactctgaactctagagaggaagaataaattagtcctgaaaagaaaaggttacaggcttgaarttaagcaaatttgtccattgatgtgggaagttagaggagaaaaagacagaagattaaaaaaatagrtctgaatgagtgcctcatttctgacaggatgactgggagggtgagaacagatttctggggaatgcaaacaaaattgttgggtgaaggaataagcagacagcaaagcactgaggtggtcaaaaatgtcagaaaatgaaaagaaagccgaagaaggtgagaacctcaagaaagaggaaataatagaagtcctgcatmgtgtagagatgtcaagtaagtaggatggaagtatgtctcttggatgttgaactttctatgttaatattgttgaggagagacttgctgacatgatgggatattcacagagaaacacattacagcaagcaaaaagtgagagggaagaaaataaaatggttagaataattgctggccttaaaaggacttagttgtgaaataaataagcaagaaaattatagattgaaatgagagttaagtaggagmattttcttttatttttrtgcaggagaaatataaacaagttggtagactgaaataaatgaaggcaataagtagaaatatgttagccaagtaatgggctgggagtgttgactgatagatacacatcccagaggaaatgaaagggaagaagatttagagcactagtaaaataattggatatagataggaaggttggaaatggaaaaaaagagcattacgtcttcctcttagacaagagaaaaagaggcaaagagaggcctcagctagatacattcttaaagtagtagtacagatgcaagcagtaagttccagtgtttgtttaaggggacctagttctattccacttatattcaggtgccttttctattgtccyatgcagacttaggtgatccttctatattgcaacaattctgtctatatctccttggctcacatatctgacaacgtattgatcaagttagcgacttgtctttttatctttgtatacccatcatctaaaacagagccaaatcagtacctccttccagtatacacagttgggttaatctagagaatgagtctgacacagaaggatcaawggcaaaatgtgcaagacaaaagataaaagggaggaagagcattaggaggttcactgggaaacytgaattccactgagtcatgaatggatggcttcttataaatacagtgttaaattygtctctcgtattttaaggtaaaatagaactgccagaacgtgaaagaagtgcagcaggatttttgtgaaggaaacagccttgtcttcatttgtctgttttactaatatgttgcttttatccttttatttcagctctaagtggttatgacttgctgtcaagatggacagcagacagacttgatgctgtcgtcgtatcaaccaagtaagagctgtgctgtttggtttcctggccagatgtctgacatgccaagattttctcagctttctttttttttttttttttttgtgatggagtctcaccctgtcacccaggctggagtgcagtggcaggatctcggctccctgcaacctcctcctcccgggttcaagtgattctcatacctcagcctcccgagtagctgggattacaggcacgagtcaccacacccggctaatttttttattttcggtagagatggggtttcaccatgttggtcaggcgtgtcttaaactcctgacctcagatgatccaccctccttggcttcccaaagtgctgggattacaggcgtgagccaccgcgctcagccgattctctcagctttctcagccaatgcatgatcatgccaaaaataaatgtttctcagatgacactaagtaggcaactgcaagtgagtgctaggcttaacctgattagagttgagaaaaaaaaatctgtatatgtgtgtacacgtgttattttggcaaaaagaaacagcaaaaagtaaaaatttttttcacataaattcaaactgtatcatttatggatataattacctggacggtatttcctttcaacccttaattcccagtctttaaaaatgagtgccctggagtcacaggatcatctataaaagtgcatcataaataatttccatctcagatggtcactgtgaagagtaagtgataacatccttgaaacaragtccagcgtatatagcacttggtgagcctaaaatgtaggctatataattttaaatatttaaaatatagcgtatagtttaggctcaacaagtgttatacactgcgctaagtatattaaaaatgtattatcaaattaaacaaaatagatgagttcatataaaattatgttagataaataatccacytatggaaagagcacttagggacagyaaaattaggggcggattgctgggtagactcatgccagagcagtatatatttaaattgaaatttcagaragtaaatgaacagttaaaaaaataacatactcatcaccatttgtcaagttaaatcattattataaagttgggacataatcttgatcaatatttggttgtatgtgatcactcataaatatagtggctagaataatattttgtaaaatgcaattagaaaatccaagcttatgctgttttgcattccaactttatacttaaagagaattttcttaaacatggcaagtcaaattatagtataaraccgacatctgtgtttaattcattgcaatgactaataaatcactagtacatgaaagataaaatatactttaaaatatttatgcaaatatatgccttgccttcaaatattctcattttatttatattaaagatgaagaactccagtattcaaagatagataattttggttatatttaaattaaaatggccaataagcatctttcatgtacttgaaagataaaatatactttaaaatatttatgcaaatatatgccttgccttcaaataatctcattttatttatattaaagatgaagaactccaatattaaaagatagataattttggttatatttaaattaaaatgaccaataagcacatgaaaagatgctcaatatcattagtcattagagaaatgcaaatcaaaaccacaatgaaataccacttcacacccactaggatgggtataatatatatatttaaaaagataataacaagcgttagtggggacatggaaaaatcagaatcctctatactgctggtgggaataaacacttcggcagctccttaaaagttcaaacagagttaccatattgacccagtatttccatttctaggtgtatacacaagagaaatgaaaacatgcccatataaaaacttgtatgttcrcagaagcagtattcataaaccttaaaagtggaagcaacccaatgttcattaactgataaatggatgaataaaatgtggtatatctatacaattgaatatttgaaattcaattgaatatttaaataaaatgtggcatatctatacacatattcagttgtgtaaatataccacattttattcatccatttatcagttaattattcatttgttaataaaaggaccactacagtatggacaaattttgaaaatattatgctagatgaaacaagccagtcataaatggaaagttttgtgattccatttatataaaatgtccaaaatagggcaaatgcatagagatagaatgtagattaatggttgcctatgattgggtttggaggatggggagaaatgagaagtgactactaatgggtataggatttccttttggcatgaggaaaatcttccaaaattgattgtggcaatggttgcacaactctgaatatattgaaaatcactgaattgcatacttataatgtgttaattttatgggttatgaatatctcrgtaaaatggttatattaaaaattaagggcatacttttaatgtgttaattttataggttatgaatatctcagtaaaatggttatattaaaaattcaggctgggtgcagtggctcatgcctgtaatcccagcactttgggaggccgaggcaggtggatcatgagatcaggagtttgagaccagcctggccaacgtggtgaaactccatctctactaaaaatacaaaaattagccgggtgtggtggtgggcacctgtaatcccagctacgcgggaggctgaggcaggagaattgcttgaacctgggagtgggaggttgcggtgagccgagatygtgccactggactccagcctgggcaacagaactagactctgtcyccccscaaaaaaaaaaaattaagaaattatgttcatcaaaagacattaatagaagtcttaaagtttgtgtgtgtatatatatgtgggtatagacatatgtatactataaaagtttttaaatacatatatacattttcaaatccaaaatataaaaacacctaccaattaatagaagtataggcgaaagactcagaaagacaatttacagaaaaggatatygaaatcatcaaacaatatatgaaaatgtactgtatacatcaggaaaatacaaattaagactattataagatacctgyatatactcgagattatagataaaatgagaaagacataagataccaagtgttggtaaggttttgaatcaacagcacttccataagctctagtttgagaataacttggtaaactacttagcaaaactctttgacattattaagtaaagctaagcatatatgcatacctctgttattatcaatagcacaggtatgtatcaacaggaacacagccatagggccccaaaaaacatgtactagaatattcatagcagcactgtttgtgcccaagactgcaagcagcctaaatccccataacattttttttacttggaaaaatatttatttagtatttattgtttgtttaattatttataagaacatttaatatgtgatctaccctcttagtgaatttttaaatttgcattatttttgactgtaggtacaatgttgtacagcagatctgtggagcttattcaacttgtttgactgaaactttatgccagctgatcagtaactccccatttcctcctccccacagcccttgcaaccatcttttcactctgattctatgaatttgactattttagacaccttatataagtggaaacatacagtatttgttcttccatgagtggcttatttcacttagcccatcaacatgttaatgggtaaatgatttgtggtatattcaaacaatagagtactatacaggaagacagaagcaatgtgaatgaggctcaaaaacataatgttgaacaattgaaaccagatacataggagtatatgctatatgattttatttatttaaaggccaaaactaggcaaaattaatttatgctgttatgtcaaattagtggatacgtcaggaattaaagagagtaaacaaaaggtttctgggatgcgggcaatgttatatttcatgatctgagtgctggttatatggctgtgtttagtttgaaaattaaagaaattatatacttatgtgcacctccagcatgtattaggttggtgcaaaagttattgmggttttgtcattacttttgcaccaataatatattacagtctaatcaaaacaaacaaaaaaatgtgtaaactatgttttctctctacagctacagattagcacctaagtatcatttcccaattcaatttgaagatgtatataatgccttaaggtggttcttacgtaaaaaarttcttgcaaaatatggtgtgaaccctgagagaatcggtatttctggagatagtgcaggagggaatttagctgcagcagtgactcaacaggtatgttcataatttctatgctttttaaaaatagcgtttctacgctgttttaaaaacatatttataaacatattgaatgcatgtattaaaatatgaatgcaaataggagmtattrattttttgaaactattaaagagaatrttgagaagaaatgactaaaacattataatatcaatccctgcttctgtcatagatttttttttcttccttaagggaatgttaattctttggataaatcattcatttaaaattatagcctgcatgtggtagctcagcactgcaatcccagcgctctgggaggccaaggcaaagggatcacttgagaccaggagtttgatagcagcttgggaaamacagtgagaccctgtctctacaaaaaaaaaaaaagaaaaaagaaaaattagcctggcataatagtgtaagtttgtagtcctagctacctaggaggctgaggaggctgaggcagaaggatctcttaagcccaggagttcaaggttacagtaaggtgtaatcgtgccactgtactccagcctgggtgacagaataaggccctgtctcttaaaagcataaaaaataaaataatatgtgtcagtaaaatattatattaagtaggtgaatgakatcatgtaattgtgagactaatgaccctattacgctattagagattcagacgaattcrtataatcttcgatggtgtattcctttattaccataataatcatcctattttaagaaaattatcaacacattcaaagattcccatgctacttacaaagaagaaatatgaagaattcaaaagatttttgtatgtagatgtaaaatcagatctttttatctgtcatttaataatggcaatataataataataataataacaaatggcatttttgtcccagattatatgtagaatagattttgtttttatgatgaaggagaaacactgctattgattgtttaaacatctaaactcttttctcatgtagtagtcgcaaaggaactattttcccatggagtagcagtcaggagaagaagctacctaagatcttctctctaatgttaattctttggataaatcattcatttaaaattataggctgcatctggtagctcagaactgcaatcccagcactctgggattatgtagaagttaagtagaacatatgtagaaggttagatttttattagttgactttagttacaaacgagggttctacagcaattttaaaacattgctgttatttgttttgttaattatatttatttataatttttcacactaaaagcattttgactgctagaatctgttggacaatattctcaaaagtaaagaatcatagttgcactttgtttcaaccacaatatagaacaagtatttgaaacttcacagatagatttctaatcattattatggatttcataatgtagcagcaaaagcattagactggacatcaggaaacttggagatgcagtaatttctagatttgatattggcttaatctccctaaataaacattcatttcctcacctgtaagaaaaatgaactctttcaactttaaagagttgtttgagagtcatatgaataaatttatataaaaatacctggcaacttgtaacaatctttacaaataggctccacaatggtctattttgataattatagttaaaatgtggataaatacyacaatttgcaaaatatttggggttacatctaataatatctgtacttttatttagaagttctatacatcytttatagtatattacacacttcraaaacacaaaattattttttaacctatatgttttcacaatttaaaacatattttgtaatatttcaytcttataagtctccttttttcctccctggtattggtatatccctctttacagaccactgattattacaaatattagcacaacagacttgatataaaagatgatgttaatagaccatttcacacagaagtcttgcccaaatctcctaaagtaacatktcgctttagcatcaaagccatgtcagaaacctctattaagtgatccttcttcttcatggcaaagcttattgatatactggtatattttaataatatatttttttgagacagtgtgtcactctgtctcccaggctggagtgcagtggtgttttctcagctcactgcaacctccacctcatgggttcaagcaattcttgtgtctyagmctcctgagtagcttcaatgacaggtgtgcgttaccatacctggctaatttttgtatttttagtcaagacgggtttttgccatgttagccagctggtctcraactcctgacctcaagcaatccayacttcagccttgcaaagttctgggattacaggaatgagccaccataccaggcctattttaataaactcttacatgaacagaagataatatttatgcaattcttctggttatcattcctagcagaaaggagattaactttctaatgatcacttagatctttttgcattatccataaagcatatatgacagatgattttccttaagttgaaaatattgatgaacatctagttctagaaacccattttgaatgttagaaagtttgctgtggtggtatgtttcatttattacttaagtctttttgagatcatgaatagatagatagataaaaacaagatagatagacagatagataatcttattagggatattttwttgktttaaatgaaaatgatttgtgcaaatcatcttgcttctcagctccttgatgacccagatgtcaagatcaaactcaagatccagtctttaatttatcctgcccttcagcctcttgatgtagatttaccgtcatatcaagaaaattcaaattttctatttctatccaaatcactcatggtcagattctggagtgaatattttaccactgatagatcacttgaaaaagccatgctttccagacaacatgtacctgtggaatcaagtcatctcttcaaatttrttaattggagttccctgctccctgagaggtttataaaaggacatgtttataacaatccaaattatggcagttctgagctggctaaaaaatatccagggttcctagatgtgagggcagcccctttgttggctgatgacaacaaattacgtggcttacccctgacctatgtcatcacctgtcaatatgatctcttaagagatgatggactcatgtatgtcacccgacttcgcaacactggggttcaggtgactcataaccatgttgaggatggattccayggagcattttcatttctgggacttaaaattagtcacagacttataaatcagtatattgagtggctaaaggaaaatctayagtaaaacatgtagctataacatattttaaaaataaaatctgaaaacctcagaaaatttgcattagaaattggtctttcttaraatggtctagttaagttccacatgtagcataattcttaaataggcacttttctgttttttttttcttactgkgggatttcatttcaattttctacattgtctatctgctttttctgagattttccttcttacactgttaatcttattttaaaaaatattacattcttgtatactttatttttgtgagttggctactatttacgatgcaagagaataaatgtgagcaaatattgcctgtctgagtaatgtcaagattttattcaatgttcatttataacgtgaaacatccctaatcacagatatgaattaagtgccaattcttttcaaaagcagttgcctcagtgaaatgtcaatttattaccactgtaaatttctttatgaaacacttttagaattcagataccaagtgttaaactaaccaatgctaaaaaaaaaaaaaatcactgtggtactttggggaattagctgctttttatttgaggaaaggtagagaaactgaagtttagtaaagacagaagaaatatttgggatgaacactgacctaacagccaaagactacagatgtggaagtcactgaccaatgatagaaaaatcagagaaaattttaatctctgaaaagcccatcccaatattgcagggagaaaaataaataaaatggaatatctttaaggctgagcagaattacttgtattaactatgaactatgtagtgtattctaattataaagaagcccaactacaggcagtcttcagatggcgcagaagctccacaccgttatcagggactaaagctttttctatctttgtactcactgatatggtttgactgtgtccccaccccaatctcatcttgaattgtaactcccacaattcccatgtgtcatgggaggaacccagtgggaggtaattgaattatgggggtgactctttcccatgctgttctcatgatagtgaataagtctcacaagagctaacggttttaaaaatgagagtttccctgcacaagctctctgtctctttgcctgccgctatctatgcaagacataacctgctcctccttgccttccaccatgattgtgaggcctccctagccatgtggaactgtaagtccattaaaccccttttgcttcccagtctcaggtatgtctttatcagcagcatgaaaacagactaatatactcaccatcctcagtgtctgtttgtgtgtgcatacttataattgtatttttgagtaccgtctaaatattatatctaggcagagaagggatatggcagaagagctgtatttgaggtaattttattttatcaggaaaacagtagtaatctcagaagatccaacaaagagacttcttatatttcattttctaggacggtgtcacaaggaattttgcaaaatagaattttagtagttgggcaaattgcacattcttattttaagaaataaggcaataccctagccagagcaatcagacaagaggaagaaataaagggcatccaaatcagtaaagaggaagtcaaactgtcacagtttgccagtgatatgattatatgattatatacctagaaaaccctaaagactcatcagatcatagatctgataaatgaattcagtaaagtttcagaatacaaaataaaagtacacaaatcagtagctctgctatacaccaacagtgaccaagctgagaatcaaatcaagaactcaaccccttttacaacagttgcaaaaaaataaaattaaatgagatacttaggaatatacctaaccaagtaggtgaaagatctctacaaggaaaactacaaaacactactgaaagaaatcatagatgacacaaacaaatggaaatacatcccattctcatggataggtagaatcagtattgtgaaaatgaccatactgccaaaagcaatctataaattcaatgcaattcccatcaaaataccatcattattcttcacagaactagaaaaaaaattctaaaattcatgtggagctgaaaaagagcccacatagccaaagcaagactaagcagaacacaaacaaacaaacaaacaaacaaacaaaaaacaaatctggaggcatcacataacctgacttcaaactatactacaaggctatagttaccaaaacagcatggtacgggtataaaaacaggcatgtagaccaatggaacagaatagagaaccaagaaatgaagccaaatacttacagccaacaaagcaaacaaaaacataaagtggggaaaagacaacctattcaacaaatgatgctgggataactggcaagccacatggagaagaatgaaactggatccttatctctcatcttacacaaaaatcaactcaagatgaatcaaagacttaaatctaagacctgaaaccataaaaattctagaagataacgttggaaaaaacatcttctacctattggcttaggcaaagtgttcatgatgaagaacccaaaagccaatgcaacaaaaacaaaaataaataggtgggacttaattaagctaacacacttctgcacagcacagcaaatgaaataatcagcagagttaacagacaacccacagagtgggagaaaatccttgcaaattatgcatccagcaaaggactaatatccagaatccacaaggaactcaaacaaatcagcaagaaaaaaataatccaatcaaaaaatgggctaaggacatgaatagacaattctcaatagaagatatacaagtgtccaagaaacatgaaaaaatgctcagcatcactaattatcagagaatgcgaatcaaaccacaatgcaataccaccttactcctgcaagaaggccataatttaaaaatcaaaaaataatagatgttggcatggatgtggacaaaagtgtaaaagaaaacacttttacactgtggtggaaatgtaaagtaatacaaccactatggaaaacagtacggaactttcttaaagaactaaaagtagaactaccatttgatccagtaatcctgctactgggtatcttcccaaagggaaaagaagtcattatatgaaaaagacacttgcacacgcatgtttacagcagcacaatttgcaattgcaaaaatatggaatcagcctaaatgcccattaaccaacaagtggacaaagaaaatgttacacacacacacacacacacacacacacacacaccatggaatactacccagccataaaaagaaatgaaataatggaattttcagaaacctggatgggtttggggaccatcactgtaagtgaaataactcaggagtggaaaacaaaatatcatatgttctcacttataagtcagagctgagtcatgaggacacaaaggcataagaatgatataatgaacacaggggacttggggggaaagttgagagggcggtgagggataaaatactacacactgggacagtgtacactgctcaggtgatgagtgcaacaaaatctcagaaattaccactaaagaacttatccatctaaccaaataccacctgttgccccaaaacttttaaaataatgaaaaatgaaaaaaaaaagtccaggggataaaagttggaaaaagataaaagcacttaatctgtaaaacaggcagaaaataaagaaagaaaagaaaagaaaaggaaaggaaagaaaccaataatataggcaactagtagaatatgccacacatatctacagcaggaatttgttaaaaagcaattgtggaatgatgattttctgagtaaataaggagagttgtaggttaatattaaaggtaatgaatagaaacataagttggattatggtcccaaattgaccgtttctgtaccatgtacaaataaaaaatgtgttggctgctttgaaataatctctagaactcatccatgcctggcgtgtgctattgttttatctgatccttcttcaagggtagaaagcagtgacactaacatggatactaacaagcaaacaccttcttggccagaaagtggggtttttaactgttatctgtgatatttgtacattaagcaaatattttctttgacactttgatattctgctttttgtcctaaaggcaaaaagcagacaggagaagcaggtcagagtgtcagcctactgagatctatgaaattaacattctgaaagttggaactttatcttcataaaggtgataatgtttttagattagtttaatttttagtaaaattgagtggcagtgatacaatttcaaaacagggggattactttgggagaaaatccaaaaattccaatgatctggcaattctatttcaggtgtttttctcaaaacaaattgaaacataggtctacaagacagactggtacacgtaagtgtattctggctttattagtatcagcaaaaaattggggggggggtggaattctccaacattttctattttcctcctcttcaacttctaacaactgaaatttagtacttacttgaggacgctgctttctctatattccttacatcacaagggctaggagtgaggtacggatttgccttactgctccttgaagaacattccttctaccgccagttttgttcaggggttagcaacccacagcctactggccaaattcaacctcttgcctgtttttgaacaactctaagctaaaaatggtttatacattataaagcactgtggaaaaaataagaaaaataagaagcagtgatggtagcagtggaggaggaggaacaggaggagcaacagcaggagcaagaagagcaggaggagggaggaacaggagcaggaaacaaagactacatgtaactggcaaagcctaaaatatttattatctgaccctttacagaaaaagcttgcaatagaccttaccaccactatcagtcctttttgtagtcagctcctgagccctgtgttactctccctcatatcttaaaagattttgagctcactgacaatatctcacaattacattggtaatctcagtatttatctagatgacccgtcgagctacctagaatcccagctgtttggaattctctcccctaataatcttgttcttttagtggataaaaaactctcatggtcaatcctagaatgtgttatgatcaattactgtgcctactctataatatcaataccaaacattccagttcactccagttgggtctctaattttaataacatttaagaaataatagaagttaaaattcattgactatatccaacacttcactcttcctcattgccctaatgtaattttttctcttccttacccagaatatgttctgtggtcagttagagcaatgcctcccttgcataagccatcaaccatcaacccccgtggatctctactaatgtacttgtttatcaaaactccaaccttgaagacattcacctactgcctactcttcacatgtacctatgcagttacacatggttggagaaaaccaaaaaagtgctgaaatttcccacttaaatgaagtctgtaaacctcgattatgcctttaataatgcctagcaatcatactataattttccagtcccttgagacttctgttcctaactctcatcaggtctccaatacctcctctgccatcttttatcacagctgataactgtgcttcctatttcaccgaggacacagaaacaattgaagaaaatttccacaagttctcaccctatatcaacctctatcgtctatttcaccttttattactatagatgaactaagcgtttgtgcttctgtgtaaggattgttcctctcaatatgtgcacacgtaaatgactcttgattttgatgtttcttcaaatttgttgtgtattaagaatcatctcaaagggttcttttaacaaatgaattttgagataccactacccagaattttccttcatcaagaagcccttagatgattccaaaaaaagaacatttgaaataaaaccaatctggtgacagagaaagataaatatattaaccacttcaattgatagaaataagaattttgttcttcagactggaaagaaggaaggaagcatactgccaagaaaaccttgacacttgccctgaatttggaggaacaaacaggagtccccagtgaagaggatagctatgggaaagcatttgcaacaggagaaacaatgctttggagatcctggaggcagtaaaccacatagttcacttcatcctttgacatctttcctagagagtagaaggcagggaagctggctggagaagtgaagttctgaggagcctgggctgctgag

SEQ ID NO: 95314 - DNA, 29921 bp, Homo sapiens
  misc_feature (1)...(29921): n = A,T,C or G
agtcacactcacctacgtacatcctggagtgaaactccttctcctttctgcttccaccattactctaatcctcaaagggttaaccagctttcacacgattttcccatctcccaggtaacttgggcagctgctccgtgctggaaataactaaagacccagtttctcagttcgtgcacttagcaatgcaccccagtagcccctccaacccccagcagagaagcacagccctttgggtaaaagatgcctgggggtgaggctgcaagttggcaggtgcgggggaggggctcccagagagtagggcggggggttgtgggggcggcagggagagtgccccttccctgggtccctccactgggccccgaggttcgcctcggggccgctgccccagagactggggggaagaggaaagaagtggtgtgcgggcaagcaggccgcacacacctggcgccttgtggaatgagagcttaattaattattaaactgagttcccgcgggagggcgcagggccgtgacaggcagggcgggaatggctaggtgggggctggggtggggcaggggcagggaggaattggggatgaagagtgggcgcggggcgccggcccaacccctgggaccctgacaggaaggaaggcgaccctcggtgggcggggcgggggatgtagccgtgaggggtgggtttgcgggcgcgctcggggacccccggggtgagggcgggagaggaatgccggaggaggcggccggggtgaagggaaggggaccgggctgcgaggtcccctccccgcggggtcttgatcccagaacagtagctgcttgtcttcccaggactgggggaggaagcggccggaggagaggagggggcgcgcggagggaggggtcccattatttggcctcctccgcccctaccccgctgctaggaaggggagtgggcaactcggcccccacttctggggagggggagggggatgcccagacaaaaggagcttgtgcctttaaggcggggagtccgggagccagcggggaggggacttctggatccggggtagagggcggctgcgctggacagctcgggagggggcgagggccgggcggacggcggacggcggacggcgggcgggacggccaggacgcgcgggctcggaggaccgcgggacggccggccggccggccggagcccgcgggggcggcggggcgggggcccagggcaggcgcggagccgggccggcaggtgagcgcgctgagggctaggggaagtggccgctcgggctcccggtgcgccaggattggaacgcacccgagcggctctcgacaagagtttgtgggtgggggcgccgaagccttggacgggtcgtctcggcagtgttgcccgagggagttggggttggcaaagggaagtcatggaggcagtgggatcgaggactcctaggtccggcgctcgccacccccgtcgcccgccgcctgcctccctccacggggcgagttccaggctggcccggaggccaggaggatctggcacgtactgggggaggggctggcctgagttttttgctgcggggctgtggggtgtctccgagtttgggggagattccatttaggggagaggaaccggcctgggcagagggagggatgccctctgtctgcgggagtccctctccttcccctcacccaaaaccttgggaatgaaaggggtggggtcggctccccacatcccccaaggcctgccgcagggtgggcaggggagctgactttattcaaagcagactctggggctcgactgaaaggctagaggtggaatcaggcgtgggagcctctttgcccatatcctctccttaccagattacccctgtgagctggagggacctggtgggggttgcatagtaaagggtgatgtgggagccctctgtaatctttagggagagtgaggactggggatgggagaaggcggcagcgggcactggaccgacagatacaggccctgggtaggctcctctacatctggaaaggcccagaattgaagaattgaggcccatgtccgagtatggtgggtggtgctggcactgctgggccccgcctgggcagtgcctcttaccatgaactttctgaagtcgtttttaatcccctggagcctccttttgccaaggagggcaggggcagatgggccctggggatgggatagacaggaggtggccaggaaggcttggcaaggcagtgggcagagccatccttagggctgggccttggccttggctggttccaaactctggtctcagcctgatcagggtttgggagggacttgaggtctgggaggcactgagcctgggcctgccaggctgaatgggacatggctgtggctgtgggagccggtggtatgaagaacagcagatctgtgagagtgcaaatggaccaacactcaggggaggagaaggtagaggcacaaggcttaggagcctgactctggggaggagggaggtggtctgtgctcccagggctcatagtgatgggttgctggacaaagtgggttgggggaccatatagagaaattttgtggcttggaacagtgctctaccctgtttcctgccataccagtctggcatggggtgccagaaatgttgggaggccggcaagttctgcgggatgggcagtgcctggagtggagcccagggtgggatggttgcagttggttggacaattacatagctctgaagctatccccttgggggsggtcagagtgttcctgggagggtcatgcattctcctggatagcatttgcccctttctctgtgagtatgagccagatgctaggatgtgtttccagggggcttggaacatggccagaaactagtcctttgggaacaggtccgggccagtgctggtgggggtggtgtgtkgggggagataagaacagggaaggggactggtgaatggaggaggctgaagcaaaatgttgtgggtggtggatggtggtgggaaacctgctcactstgggctctgtctccagcagctctggggactgacagccaaggacacagggactgatagaaccaggcatctgactggctagaaagacgtgtgttcttgctcatgatttyctcatctttccatctcttgacgatgacagaggtttgggtttaaartgttgtagagtgaggagaagaactaatatttttcaagtgtgtacttcttgacaggcattattagattctttcctgaggaccattatcatttccattttgcagatgaaggtactgacacagagaggttaaataacttgcccaaggcagtgtggctagcaaataatcacgctaaggtttggaaccctggtctcatgccaaagatcatgcttctaatgaagtattttgaagagcaaggctttctttggtgaccttttccaaatgccagcctgaccaaaagtcttgtattcctgatctgtccttccagatggtgctgttggtgatgttaagaggttgaaggggccaggcatggtggctcatgcctatactcccagcactttgggaggccgagacaggcagatcacctgaggttaggagttcgagaccagcctggccaacatggttaaaccctgtctgtactaaaaatacaaaatttagccgggtgtggtggtaggtgcttgtaatctcagctatggggaagccgaggcagaattgcttgaacccaggaggcagaggttgcagtgagctgagattgtgccactgcactccagcctaggtggggcagagtgagactccgtcttaaaccaaaaaacaaaaggaggttgaaggacgtgctgctctgtgggatataggagaaggggtgccgacagatcttggctgagggtgactcagggatgggaggtttggggtatgcagagaattccccagcctgccttctgcgtgtgggtccctgggtgtctgcttcaagcgctgcccatctggcttgagctctcattctatggccacctggggcaagtgctgagtattcctccatcctgtccccgagtgagtacaaatgtcagtgctgstagctcagcaggtttaattacaagggacccctcagggtactctgtgagcatagaggagtgtggccctggtggggacacaggcatgcatggatgacagtgctgtcagcctcatcttattctgacctgggctcagccaggagtcacattaaaggtatcatcatggagtcctcccacctcagttcatgacatttcctccaggaaatgtgggatctgggactgatttggttaccatgatctctataacttgggccagccatataaaactgccatggacctcagtttttgtttatatatatttttcctttcaaatttgtcttgtgccccagggggcaacaggaccagtttctcagggttttggtgaagatcagatggaattagggatgtgaaaagatcttgaacagtttaaagcatagagaaagtgcatggagtatcattcgtccatccatccagtcatccatctactcaatgaacatttattattattattttattttttgagatggagtttcgctcttattgcccaagctggagcgcaatggtgtgatctcagctcactgcaacctctgcctcctggatttaagtgattctctcacctcagcctcccgaatagctgggattacaggcatgcgccaccatgcctggctaattttgtgtttttagtagaaatggggtttcaccatgttggtccggctggtctcgaactcctgacctcaggtgatccactcacctcggcttcccaaagtgctgggattacaagtgtgggccaccatacctggcctcaatgaacacttgtttaggtccttctaagggttgtggatacagcagtgagcacagcaggtcaaaatccttgccttcataaggctgacattccagtcaggagagacagaaaatgaacacataagaaaaatatatagaatggcagttgctgattagagctatggagaaaaagcataaagctgggaaaaagatagagagctccaggaaagggggttgctattttaatagggtggtcagagggagcctcactgataaggggacatttgggatgtgacctggaggagctcttgttccagacagagggaacagcaggcactgaggtcccaggctggcctgtgcggggtgtgttgggaaacagcaaagaggttcttgtgactggggtgcagtgaggaagctgaagagccttaggattatcactgttagctggtggcagatcatgaggtcaggagatcgagaccatcctagctaacacagtgaaactccgtctctactaaaaaatagaaaaaatttccctgggcatggtggcaggcgcctgtagtcccagctatttgggaggctgaatggtgtgaacccgggaggcggagcttgcagtgagccaagatcgtgccactgcactccagcctgggtgacagagtgagactccgtctcaaaaaaaaaaaaaaaaaaaaaaaaactccagattttttcttctgcttctgttgagaaaaatcagatcgggacccactgggacccagtggcaacagtctacagctgctgggtggtgcctgccccatgcacagggtatgaactcttttcctcccagttctgaaccataagctgcttcactcattgacttgggcacttgagtttgtgaccaccaacaaacagtgccttttagggaaattttcaagtatactggctttggggtcagacaaatctggtttagaatcgtggttctctcacttatgtggctgctggatctttgggcaactctttcttcttttcttttctttgtattttattttattttattttattttatttccctcccttccctcccttccttccctctctccctccctccctccttttttccttccttccttttttttttttttttcaggctatggctattgcccaggctagagttcagtggtgcacaatcctggctcactgcagcctccaccaccagggcccaagcaatcctcctgccttagcctcctgaatggcccggtctataggtgcataccaccacaccaggctaatttttttttttttgagacggagtctcactctgtcacccaggctggagtgcaatggygcgatctttgctcactgcaacctctgccacccgggttcaagcaattctcctgcctcagctcctgagtagctgggattacaggcgcccgccaccacgcccggctaatttttgtatttttagtagagacgaggtttcaccatcttggccaggctggtcttgaactcctgaccttgtgatctacctgccagggccttccaaagtgctgggattacggacgtgagccaccacgcctggcccaggctaattttttgaaattttaatagaggcagggtcttgctgtattgcccaggttgctctcacattcctagccttaagccatcctcctatctcggcctcacaaagtgctgggattacaggtgtaagccactgtgcctggttttgggcaagtttcttgtcctgactgtgtcttgggttctcacctgttgattggggatacccttgttgcctacctccaagtaattttatgaggatgaaactcatagcttgtcagtgggaagtgcttaggtaatgagctactagtggtggcagtggctgtgatggtggtattaataccactcctactggatggtctctaatactatctccttccttccctaccagcaacatgtcatggtttagtggcctcctggtccctaaagtggatgaacggaaaacagcctggggtgaacgcaatgggcagaagcgttcgcggcgccgtggcactcgggcmggtggcttctgcacgccccgctatatgagctgcctccgggatgcagagccacccagccccacccctgcgggcccccctcggtgcccctggcaggatgacgccttcatccggaggggcggcccaggcaagggcaaggagctggggctgcgggcagtggccctgggcttcgaggataccgaggtgacaacgacagcgggcgggacggctgaggtggcgcccgacgcggtgcccaggagtgggmgatcctgctggcgccgtctggtgcaggtgttccagtcgaagcagttccgttcggccaagctggagcgcctgtaccagcggtacttcttccagatgaaccagagcagcctgacgctgctgatggcggtgctggtgctgctcacagcggtgctgctggctttccacgccgcacccgcccgccctcagcctgcctatgtggcactgttggcctgtgccgccgccctgttcgtggggctcatggtggtgtgtaaccggcatagcttccgccaggactccatgtgggtggtgagytacgtggtgctgggcatcctggcggcagtgcaggtcgggggcgctctcgcagcagacccgcgcagcccctctgcgggcctctggtgccctgtgttctttgtctacatcgcctacacgctcctccccatccgcatgcgggctgccgtcctcagcggcctgggcctctccaccttgcatttgatcttggcctggcaacttaaccgtggtgatgccttcctctggaagcaggtaggtggccagggaggtagggatggagggcagcaggtggggaatttctcacctcataagcaggtgggggcttagtgaggaagggcgggtgagtcatgggtggaagctgggtgcagggatgtctggctgtatctgggaggaggagcaggaggtgggaggctagggttgaggggtctgcctccatgtgggatctggggtagaggacactgctgaggggagggagggccccaggacccaagcctgaactctgtcaccatgggccccagtctccggctctttagcccgctgaaatagtgcagtctgtagagacagaatgtggggctggaggcaggggtgtggtatatagccccagggccaccgtggggctgaaaaggcagtgcaggctgtgtccaggccttagcatctcagcaggcaagttgacaccagagactgaggcgctggtgctatccctgaagagcagctctaggtggtgatctggaggtatagagcaggttttggatgttgtcagcaagagaggagtcccctctttcctggaccaaggccacttctgggaggacagggaaggtgaagagctggggtcagttctctctgggctggatgtggtttgaatggggttggactgttgaagagaggagcgttaagtctgatcgtatcccaccttccccatgctgggcaccagggacctgggcgcctttccttgaggttctctgtccatgcctgttgctgcctccaggctccaagtgtgtgtgaggtgggactccacggctccgtgtggagtggctgtaggctgacctgcttatccagtgggctgtattcttttctgtgggatcttagacaactagcctcacctctcccagccttagtttcccagtctgcaaagctggaataaaaatagcatctagctcatgttgctgttggggccccaccctttcctagagtggagtagaacccgactgggcagtgttcacacctgggggcagggaggtttggggagtgctggaaggcatggtacccagtgaaggggtttctgggaagtccctttcagagagatgttagtttgtggatctgccatctcctgttacccccctgcccagggagcagaggccagggtccttcaggcgctgctgtaggcacagccccgccatcagcacagcgcctkggtcctccactggaccctaactagagagtgctgtcttgctcaaggttttgaaggcttgtggcctgttgcccaccctgcctcaggcacagagaggaagttgcctggggatcccagggtgagaagctaggttctctggcatgatgcccttctccacccagcctgtgctgcagaacagaacttacctgttttttttgtggtttttttttttttttgagacggagtcttgctctgtcgttaggctggagtggtgcagtggcgcgatctcagctcactgcaacctctgcctcccaggttcaagcgattctcctgcctcggcctcctgagtagctgggactasaggagcgcgccaccatgcccagctaatttttgtatttttagtagagacaagtttcaccatgttggccaggatggtctcgatctcttgacctcatgatccacccgccttggcctcccaaagtgctgggattacaagcgtgagccaccgcacctggccagaatgccagaatgccagaacgtaccttttwaaaagtaactttatagcccgtttgtttgtggagcacgtgcccttagggcactgtcagacatcttaaagggccaggtccttctgccccaaagcttctcttccagggtggctctcaaccagggctttatggctggactgccctcctggggaaggagcttagaggtggtgtctcctttcccccttcctctctggccaggcatgggctgggtgggcatctgttccctgctctcgactggcatggtgcccagagccaggcccagtgcctgactggggaggtgcagtcccagggaggccaggactgtgcccgtctccccaggagtgtctggctacagcttcatgtagtggatctcgataggcacattcttggggcagtggcgaaattcactgctgcccctgtgccagtccttggggccagrgctgcccatacaacttcctctgggctgagaaacattccctgtgcccatttgggtatgtgggtttctagacaggtggggtttgtggcctccttcctcgtctacttgggcagccccttcccagatccacccctactcacaatcacaggaaggagactttgtcccctaccgacccactcatttagacatactgaacagtgtcacccagtgacccaggcccagcttggagtctcctccggtcccctggcatccattttttctcatagtcagatagggatgtgtgtgtacagagttatttcagtctcgtcccccttccccttccctccaccgtgactcacattttcctcttgggctcctggggccaggaagggaagttgcctggtttgccccccttcccttctcccccactgggggctattcttagaaacccccaagggagatagtgtgcccctctcttcacccctgctgctgggagggggagctcagcctagttgatcctgggcctgtgagctggactgggaagggaagctaggaggcccatcccagaggctggagctggaaatggctaggggtgagccaggcctccccctcagttttacccaagaggaaactgaggtcccaaagtttaagtgacctgcccaattttgcaggactagttctagttcaagttagagcccagaacctctggcttccaggaagtgcttctgctgtttctctcccttctccttaaaccagagccctgccccatccaactctggggtggagccgcaagctccaggttaattcctgagtttccagaaacactgaggccagcttcccttagacttgctctctagccagtgccgctgatgatgattgggggctgaacattcctagggtggggccctaggcctagggcctggcagggctgagtgtcagagggagttacaccttgaggggtggccaggcatggtggaccccatctccaattaggggacatcctttgtatcagtagaactgatgactctcaagccagggctctgaggttgggcttgagagcttgactcagtagagtgagtaggaatcttggaaacctggaatgcactacaaagtatggaatgcagtagatagatagtaggattaggacacaggatttggaatctgattgtcctgggttcaagtctcacactagccactaacagctgtgtgatcttggggaagttacttggcctctctgtgcctcattcccttacctttaaaatgggatattgttacctatttcacagagttttaagaaatgtgttaggggccaggtgcggtggatcatgcctgtaatccatgcccgtaagcactttgggaagccgaggtgggcggatcacttgaggtcaggagttcaagaccagcctgaccaacatggtgaaaccccgtctctactaaaaaaatatacaaaaattagccagtcatggtggcaggtggctgtaatcccagctactctggaggctgaggcaggagaatcgcttgaactgggaggcggaggttgcagtgagccgagatcaggccactgcactccagtctgggtgacagagcaaggctctgtcaaaaaaaaaaaaaaaaaaaaaaaaaaatgtgttattcagtgtatagaagacacctacagaatcctggcatatggtaggcagccaacaaactagctaccataataataatgacaatggtgattattgttactaagttatgtcaagtcagggagaggctttagagatcttctcattcttcctctttgggttatagatgagcaaacccaagagagaggaggtgacttgtcctgggtcactcacaggaggatgtagagctcaggtctcctgggtgctgtccttaaggaggagcacctgcaaaaggagcagcgtttgtcttttgtgtggggtgtttgaggagcaggagatacagggtgctggggctgggccccatgacttatctggccctagttggtcttctgcttccagaagctgtgaaaagatctcatttctagtcatggaggattcaggcagttggctgggatctggggtcctgtgggtaatgggagagatatattgcaggggtggcagtggcttggggacagacagggtgcaggaccctggcttccttcctcagagaacctagcaagttgtgtgaatgtgtgtgtgtgtttaggggggcaggcagaggagatggtcactgtctgcctctgccacctcctgcagctcggtgccaatgtgctgctgttcctctgcaccaacgtcattggcatctgcacacactatccagcagaggtgtctcagcgccaggcctttcaggagacccgcggttacatccaggcccggctccacctgcagcatgagaatcggcagcaggtggggctgctccccgtgaccagggcctgcccccaccttacccccaaataacttgcacattggatctgctgccttgtccagttccgtgcagcacagtgtgatggttcccctgggttgtgcgtcacagaggccctgtgatactggggttttgtcctgtccaagggaaggagggcgtagacaggagcacatctgggggctcaatggagggtggtcagagggggctctgatgggggaaggtcaggccacagtccagaagggaaggtcaggtcttcagagaagtctaggagggctctggcgatgtggagagaccaggagggattgcaatgtgagaccaagagtatagtgatgccctattggaaccactgggctaggagcggctgctgctgtcggtattgccccagcacgttgccatggagatgaaagaagacatcaacacaaaaaaagaagacatgatgttccacaagatctacatacagaagcatgacaatgtcaggtagggtgagggtaggaggatgcccagcagggcggggggtctggaagtctttgagggctatgtgttctgttcatcctctgctgtcatctacagcatcctgtttgcagacattgagggcttcaccagcctggcatcccagtgcactgcgcaggagctggtcatgaccctgaatgagctctttgcccggtttgacaagctggctgcggtgagggtgctgggccttgggattgggcctgggtgttgaccgtggtgagagcatagctttgctggcagcagctggggatttgagggcagatagagtatgcgtggagggtggtgggccatgcaggctgggwgggcaagagagtaaaggttacccttccctccaattccttcccattcaggagaatcactgcctgaggatcaagatcttgggggactgttactactgtgtgtcagggctgccggaggcccgggccgaccatgcccactgctgtgtggagatgggggtagacatgattgaggccatctcgtaagcagtgccccattcctaggcttcctggaattgcgggtgccccagactgctcctactttttgatgagacctcaggagatttcctcagttttggctttctctgtctttgaggtctstctgtcactgggaaggggaatctttctccaacctgtgcaaagacccatgyggacccctagactcccagccagccgagatggggccgggagagcctatgcagtaggggagttgggctagagggaatgccatctgtgcaggccagaggggataacagtgattcctcttctcctagctcagttccataagatgctgctgggcccctgctgttgaacacagccttaacatttgtccttgagccccatgcagscttctgctcatgtccaaccaaggctgtgctcccgtcccctgcatctgggtctgtccttgcccgctgggccctgagaggagtgaagggcctgggttrtgggctgggggaggggaagactgccaggagctgatctggggctgcatcctcccaggctggtacgtgaggtgacaggtgtgaatgtgaayatgcgcgtgggcatccacagcgggcgcgtgcactgcggcgtccttggcttgcggaaatggcagttcgatgtgtggtccaatgatgtgaccctggccaaccacatggaggcaggaggccgggctgggtgagtaggggggtccaggtgggggggatgggggcaaggtgggagagccagggtctcaccctcttggccacatacagccgcatccacatcactcgggcaacactgcagtacctgaacggggactacgaggtggagccaggccgtggtggcgagcgcaacgcgtacctcaaggagcagcacattgagactttcctcatcctgggcgcmagccagaaacgggtcagggccagggcagggctgggggcaggggagcaagaagagggacaaatggggaggagcaggccaaggyctcctctgggcccctcttctgagcctgtacccatgctgcccgcacagaaagaggagaaggccatgctggccaagctgcagcggactcgggccaactccatggaagggctgatgccgcgctgggttcctgatcgtgccttctcccggaccaaggactccaaggccttccgccagatggtgaggggccctcagcaccagacctagggcctcattttcttagctccctcaataccctgtccctgaccctgtcctttcttgtgactgccatttccatgtatgctttctggtattggggcagtgagaagatttcatctcgggtcccagtgcccccagaggatatgacggggacaccctcagcacagtgttggggtgggggaaggagctgcagagatgaaggttgttggccyttcacctcactccacactctgtccctttctccagggcattgatgattccagcaaagacaagtaagtcaggttactgaggagggagaaggcacttgcaccctgggatggggctggggggagccgagatcctccttttccctgaccttaggagtgttgtgtgggagcaggagccacccccctggctctccctccctccctcaggtgctgtccatacctttcctttcattgtttctcacatggccatgcccatgcawctggtgaaaccatgtctcctgccctcrgccggggcacccaagatgccctgaaccctgaggatgaggtggatgagttcctgagccgtgccatcgatgcccgcagcattgatcagctgcggaaggaccatgtgcgccggtttctgctcaccttccagagagaggatcttgagaagaaggtttgagggatacagggcagaaggacaagggctgggggaggggcaggtcgcagcagggaaggctgagcacaggtgagggcacaggtgtttctgggggatggagaagggaccacagagcagggtgaggatttcatcagttgagccaactgcatctcctccctgttgagacccctggtagtgccctgtccttgctgtccctgccttccttagggagggcccagcactcagctcagcctcstctccctcagtactcccggaaggtggatccccgcttcggrgcctacgttkcctgtgccmtgttggtcttctgcttcatctgcttcatccagcttctcatcttcccacagtragrgccctgcctttcctctcttagcttctctcttcaccacttcccagaagcttcctaaatacccacacaagcccacaatccctggagcctgcatccctgcttgttycagagggtgggacaagaatgcccagatcttccrgaattaaatgatttttctggccctgttctgccccagctccaccctgatgcttgggatctatgccagcatcttcctgctgctgctaatcaccgtgctgatctgtgctgtgtactcctgtggttctgtacgtaaggggatttctgaggctgttggggagggcaggctggactccagacagggaggaggtcacatggggagagggagaaggccatgcctcttccactgggccccatmcctggttgccattcctccttggctgatacaaccttcaactcttggtctcttgatgcctctagctgttccctaaggccctgcaacgtctgtcccgcagcattgtccgctcacgggcacatagcaccgcagttggcatcttttccgtcctgcttgtgtttacttctgccattgccaacatggtaagggtccagtgggaattctcccacctctgctctgtgccaagcactgtcctggasactgggagtacagcggagaaaaggacatattttctgccctcagggagccccctcccagaataggggaaggttaactccggttctccttccttgttctcccaacctcttgtcatccctgagtgagtactaaggcccatggggtataaggtacctgggcatagcccaggttagggtacatggcttcaccaggtaccttgcaaccctttccctccttggttaccctgatatacccctccacttttgcagttcacctgtaaccacacccccatacggagctgtgcagcccggatgctgaatttaacacctgctgacatcactgcctgccacctgcagcagctcaattactctctgggcctggatgctcccctgtgtgagggcaccatgcccacctgcagctttcctgaggtgttcgagcagtgctcaggcggtgggggggctgtcctgkcacagacattggcccttctgtgccaggcctggtgatgggcgctggggacccaggaactcaccagagtctcccacactaggagcaaccaggggccctggtgtgttgtaggggctgggcatggaaggtggaggatatgggggtttgaggggtgtggtgggaaggttaggtcaggcaggagagtgsagggctctccctgcccaagggtgctgtggcctctgccttcacccaacgctgcctctgccacccccgcagtacttcatcgggaacatgctgctgagtctcttggccagctctgtcttcctgcacatcagcagcatcgggaagttggccatgatctttgtcttggggctcatctatttggtgctgcttctgctgggtcccccagccaccatctttgacaactatgacctactgcttggcgtccatggcttgtgagtttattctcaggtyctttaataccccaggagcttccctcaccttkctaggtcactgtgagcctctctggtgcccatgccccttgtgccttggaatgccacaacwcccctgtgggggaaagggaggagatggaggagctcccagcatgtgaccccaaatagttacccccaaggaaaccctagtcctgggaaatccttgtgtctttaggctagacattaaaaaaaaaaattccctcttacatttgcatggtgctttcacatccaccatcttaaccacctataggacatacagctgcttggtggcagggctctggttaggaaccaaagcttctgattcctgcttgggggctttgcctgggacaccacactggcttttcctctgcaaaaccccattcctttgatatgtggccatagcttgttgtagtagaaaaagcctctggtctctgctgggtttgaatccctgctctgctgctcattagctrtgtgactttagacaggtgagttagcttctcygagcctcaatttcttcatctgtaaaatggcaatgtcacctaaatcacagggtagttgtaaagattatagtaactaacatttatggaaggctgactatatggcaggcactgtgctaagccttttacatacattatttagatctgatccctgttgtactgatgaggaaggaggcttagagagttaagcgacttgtctcaggtcacatagctggtaagtagaggagtctctaagagcagaggttttcttaacctctactcttaatgagttaattaatgtaagtaaaagccctggcccaatgcctgacttacagtatgtgctcagtaaatgcagtctcttgtctccccttccatgtgcccacccagcaatccaggaagcactgatgactttgtctcttctatcttcttaccagggcttcttccaatgagacctttgatgggctggactggtaagtgagggctccgaggcagcaaagggtagagccattagatgcctccttcagacaccaagcatgtctctgcttatccttagtccagctgcagggagggtggccctcaaatatatgacccctgtgattctgctggtgtttgcgctggcgctgtatctgcatgctcagcaggtggagtcgactgcccgcctagacttcctctggaaactacaggtgactgtgtgggcctttsggggaagaggaggaacctaggggcggagcctgggccaggccagaaatgtatcttgtgctwgctggctaaggctcaggccacacctaggcccaccctggttccattccttctctgtgcccatcccttactccctgccccatcctctacctgccccctttacccctttgcctgttctttaggcctcatctgtctgggcctttctttctctatgtgattccctcttatccgcacttccaagccttggccaccacacctaccccttgtgaatgtcgggcaatgggtgatgggtgtggtgtccacaggcaacaggggagaaggaggagatggaggagctacaggcatacaaccggaggctgctgcataacattctgcccaaggacgtggcggcccacttcctggcccgggagcgccgcaatgatgaactctactatcagtcgtgtgagtgtgtggctgttatgtttgcctccattgccaacttctctgagttctatgtggagctggaggcaaacaatgagggtgtcgagtgcctgcggctgctcaacgagatcatcgctgactttgatgaggtacttttccagttggctggtggtggcagagagtggggggtacttggagaccagggattggaatgggtgagtggaactgggaagagaragagagatttgatgggacccagagtcatcaggggtaagggtatgcacagtggaggcagaggcaagaacccatgaaggtgtcagaggcagcaagggggtcagccctagtggggcagggtcatcactgttggggagcaggggaggacttgatctgtagggggataggataggtaccaggtggatgtcactgaagaagaaggcaatagtctgtggacagaacctcatgagaccaaccaagcaagatggtcctctgaatagagaaaattgaagcaaaatgtgaggtagtgtcctgaacatccagatcaggaatgggctgttcactgttctggagggaagtcacttgctcactctgggactcagtatcccaaaaggtaaggattggagaaattgcttaatattgcacttgtgggtctgtgttctgtgagtgagctactggagggaccttctgaagctgtatgcccaaktcctgcctggagtcctaggctgcctgttttcccagctcctcagtcttacactgatagcagcagctggaagggggctcttgagacagggaagtggggaaggcagccaaggcgtggcargaaatgagtgttggggcagggctgggtctggggtctttgccttgacagccaggtctccttgtgttgttcagattatcagcgaggagcggttccggcagctggaaaagatcaagacgattggtagcacytacatggctgcctcagggctgaacgccagcacctacgatcaggtgggccgctcccacatcactgccctggctgactacgccatgcggctcatggagcagatgaagcacatcaatgagcactccttcaacaatttccagatgaagattggtaagagggctttgttgcttggygggttttcccaggactttttccaggtgaarctgggattataggctggggatgggatcacagatttcccatcagggctcctgtggggttttcttccctctgacctcctatatcaagtctgatattaagaacagagatcattaggcactgtcctataaatttttgagcatattttaatcctgatactattatcgcctttcattggatagagactgactctcagagagattaaataacttgcccaaggtcaaacaactagtaagtggcagagctgggattaaaaatcaggtttatataaacttgaatacttctgtccttatctgtgaccagtccaataagaggtatttcctctcaaatgaactggtggatgggagtggttaatagcatggctactagagatggactatktggtttgaattctggctgctccatttactggcttatttgagaagtcttctaacttctctaagcttcagttaccttatctataaaatggggataataatacctaccttttagaggtgttgaaaggatgaagccatgccgggcgcggtggatcatgcctgtaatcccagcactttgggaagccgaggtgggcagatcatgaggtcgggagttcaagaccagcctgaccaacatagtgaaaccccttttctactgaaaaaaaaaaaaaaaaaaaaattaggccgggcgcagtggctcacgcctgtaatcccagcactttgggagtccgaggcaggcggatcacgaggtcaagagatcaagaccatcctgactaacacggtgaaattccgtctctactaaaaatacaaaaaattagccgggtgtggtggtgggcgcctatagtcccagctactcgggaggctgaggcaggagaatggtgtgaacccgggaggcggagcttgcagtgagccgagatggtgccactgcactccagcctgggtgacagagcgagactctgtcccccccaaaaaaaaaaaaaaaacaaaaattagttggnnnnnnnnnnnnnnnnnnnnnnnnnnnnnnnnnnnnnnnnnnnnnnnnnnnnnnnnnnnnnnnnnnnnnnnnnnnnnnnnnnnnnnnnnnnnnnnnnnnnnnnnnnnnnnnnnnnnnnnnnnnnnnnnnnnnnnnnnnnnnnnnnnnnnnnnnnnnnnnnnnnnnnnnnnnnnnnnnnnnnnnnnnnnnnnnnnnnnnnnnnnnnnnnnnnnnnnnnnnnnnnnnnnnnnnnnnnnnnnnnnnnnnnnnnnnnnnnnnnnnnnnnnnnnnnnnnnnnnnnnnnnnnnnnnnnnnnnnnnnnnnnnnnnnnnnnnnnnnnnnnnnnnnnnnnnnnnnnnnnnnnnnnnnnnnnnnnnnnnnnnnnnnnnnnnnnnnnnnnnnnnnnnnnnnnnnnnnnnnnnnnnnnnnnnnnnnnnnnnnnnnnnnnnnnnnnnnnnnnnnnnnnnnnnnnnnnnnnnnnnnnctaatttttgtattttttttttgtaaagatagggtttcaccatgttggccaggctcgtcttgaactagattgttctttacaaccaggagacttgtcctttttccatttttttctctgggtccttctaccagtgccaggaggtgggatgactccctgggtttaccctggagcatccactagtctcttgctgttctctccacctcagggctgaacatgggcccagtcgtggcaggtgtcatcggggctcggaagccacagtatgacatctgggggaacacagtgaatgtctctagtcgtatggacagcacgggggtccccgaccgaatccaggtgagggggatatgagcaggggctgggaggaacatgggcccggagggcttccacaggtgtctctgcagtctgctaggacaggggtagggtggctagtgttctgtgtatggtggggcagggaytgggggaagggagctagcctgactagagaacccctgggcccctgcaaatgcagcaggaaggattccaggctaagcgggctcccctcccactcccccaggtgaccacggacctgtaccaggttctagctgccaagggctaccagctggagtgtcgaggggtggtcaaggtgaagggcaagggggagatgaccacctacttcctcaatgggggccccagcagttaacagggcccagccacaaattcagctgaagggaccaaggtgggcattgagtggactctgtgctcactgggtggrgctgtggcagggggcactgagcctccagaccctgctaaccacaaaaggsaacatcccagcaggctgtgcttggatcatgctcgtctgccctcaagctggaaaacaaggggctacctaccgagaggattatgcaagtgactttctttcttacttggggtagggctgttccctctccaatcttccagcctttgggagcaggggaggggtcagtagcagaagcagagggaggcctcttgcctgagggattaaaatggcagcttgccatgcctacccttccctgtctgtctgggcagcaggttcagggctgagcccttcttttccctcttttttcctgggaatattttgtacaatattttgtacaaagacaggcatgaggagtgcctattccatgcttgcctttgcaatacctgcatccccagcactggtcctgggcacttccccaccccagccaggtgtccctcctatgcacagagcagaggagggagaagctctggggagccagctttggccatatttcaggagaatgtttccatgtgccaaatcttagtcccatgatctgtccccaaaggggaacaaagggacctctgacagcttagatttagccccagttcctgcacgctccagggaacggggtgtctggcctcactggtactgtgaaaaatgctcagagagcaagcctgtgtgtggggatgtcaggtcaggagctggaagttcacctgcaggtgccaaagagcaggccggccagggctggggcagtgccagactctgatctgaggaccccgtcggggtccagatcaggtcactctgccccagtgctctcttgctgtctgctgacaagggggcatggagcatctcttcctcttctgttgccaaatagaaaagggtcagggcatggagaaaggtgaccctgatcccaaacctgccctcccaagtctctggtgttggggagggcccgtgtgtttgtgtaactgtgtgtgcatgttggtctttgtgtgcatatctgttttccaggtctatgtgagtccttgtgctcctgctcctcagctctccaccccaggttgcctctctcctgtgggcctctgtcttctgggaataaagcagggtttcctacttcaggggatgtagagagatgcccaggttgcacaggagtgggatggggtgtggtagcaaaaggagggagaggagtcctttttgtgccaaatccctaagtgccgttcgggggccatgtgtgcagcatgactctccctgtctgtggcagggacccaagcgcttgcttaagccccagtgctccatgccagcacttgaactgtctggggtttgatggacagaggctgaggaatttcctggcttccccagatagtgtcctgggacatggtatgctttggggctggggtagcatggaatccctytgaggacctggatactggtactacggggtggggaagaggaaccttaaacttggctttccccagccttcagcctgagtctagcatgtttctagctccccagtcccttgtgaagccttgagggctggcagaagggttaggaggttgaactctagattcccttcctgtctttgccttccttttacccctttccctgcaacctccttgactctggcctgaatttgttggtgcctcagtttctctgtctgtacctatttaagccaaaggcactagcctgaattttgcttgaagatcactttgtcttggaaatgactagagaggcagaggagaagggtttccagagttgctaggtttgggagtggaaggggcaggcagtgcacttgcccctcctcatgccccttctgacaccagctccctgtggaggcctggtttctgggtaatgcctcccttgggcatcttcatgcatcaaccaaatgggccatcaggtacttcattagtcatggcagaaggaggggaaaagacttgttttccagacagaaaatctactcccctgtccccagccatatccctggataggaagggataggaagagactacttggtgccatggggtaggggtgagggtataagtagatcagagtgggaagacctcagccttgggtggcttgtctctgcttcttgccaggtgggagggcctgtccacaccctggatccccgtaccacagtgccagccatgcccttcccctgggctaccattgtccctttcctcacccagttggtagaggagtcaggaggtgggaggccgtgggctttggttttataatgtaaccactgtgggggtgggggaggatggtgaaccatgtatttcagtgaaatatttaatatatttaaatatcaataaaatcaaactctttgtaaaattctctgttctctgtagctgttctgggccctgggtgggtcagaagtgacagagcctggtgtaggaggcgacctcctgccccagggctccgtgggcctcttgtctgtggtcagaggacttcctgtggctttctccctgctaaggagaagctgcagtatcttcagagtgtgactactcaaggcctttcagcatcatgagctccagtgtgtgccttcccagatttgtgtgtgacccctgccatgcatgaagccggcggttctttccagtgccttggcccctcacagacctctcactccaaggtctggcttattcaggaatctcccacacagcagctctcacaacaatctggacactggaatcactcccatcctgaccccacagctccccccgtgcacacaagcaacttttagtccagtctgtttactgtgctttctccatctcctcctcccattagtcagccatcggaactgggaaacctccttctttccccctctgcactcttgccacaattcatcttgtctttctgcagccatatcttcttaatacagactgaaggtcctgtcattgagaatagagtgatccataaacctggaaagaagagattcagagagagattcagccaggccaggctggagagcaggagatccttaaaaatagctcccaagaggctgggcgcggtggctcacgcctgtaatcccagcactttgggaggccctggcgggtggatcacaaggttaggagttcaagaccagcctggccaagatggtgaaacctcgtctctactaaaaatacaaaaattagccggtcacggtggcgggtgcctgtaatcccagctactcgggagctaatgcaggagaattgcttgaacctgggtggcagaggctactgccaatggatggtgatttgaggggtggagaggtagcgacgaaggcagcattgggctgccacaggattactatggacacttgttttgcactagctcagaagtcacacccacaaagaggaacacaaagacacagacaaatctctaactcctttgaatgtcatcacggcccaaattctggggccagttttctctggtaagactcaaatctctcctaattccctaactgaccggagatgaaataatctctaagaattaaagtgaagggaaggagtacttcccttgacctccccacccttacccctcccagcctaacctggtcatcgcgctttttatgagacaatggcgtgggctccggatccatggcatggtttcctctggacgcactcctggatcatgggaccaccagaagctgaagttctgagcatcagtcaaggggattctgaagacctgattgggaactgaatgggtggggggaagggcaggttatctaattccttcaagttctctgctcactgttctgcctcagggcagcaatagcccagcccagcccagcaactgcttggccggaccaggtgctgagaggtcctgggagtgtggtcaccacaccctgcttcacttccggattctagcatctcacacccttcatggtcaaatgaatcagtcttggttcttcctgctgctagtaagcccatctccaagagagctttccccaagtgctaagatggtagaaaaacaagtggtcaacccacttgggaaatgtgtaagatggggtccactgatctattatttttctttcttcttggcttaatcatcctcattctcttccctcctcttggaaaaaatggcttcctttgctcactccaagtaattctctgaaacctaactaataccacctcacatttagatgctattaatagatgtaatttatctagtgcctattatgttctaaatgtggtattaaatattcttaaatttttgtaataatatcagactttgatgctgtttgaaaaagtacttttgggctgggcacggtggctcacgcctgtaattccagcactttgggaggccgaggcaggcagatcacctgaggtcgggagttcgagaccagcctgaccaacatggagaaaccccgtctctactaaaaaaaaaaatacaaaaattagccgggcgtggtggtgcatgcctgtaatcccagctactcaggaggctgaggcaggagaatcacttgaacccaggaggcagaggttgcggtgagccaagattgtgccactgcactccagctggggcaataagagggaaactccatctcaaaaaaaaaaaaaagtacttttggccgagtgaggtggctcatgcctgtaatcccggcacttttagaggccgaggcaggtggattacttgaggtcagaagtttgagaccagcctggccaacatggtgaaacccatctctactaaaaatacaaaaattagcagggcatcgtggggggtgcctgtaatcgcagctactcagtaggatgaggcaggagaattgcttgaacccgagagatggaggttgcagtgagctgagatcgtgccactgcactccagccagggcgacagagcgagactgtctcaaaaaaaaaaaaaaaaagtacttttactatttatttggataagtctaattctaccagtataaaatttgtatatttttaaaacttagaattatagcctaatattctggattgctatatagtgtttataataatttttttaaaatccctaataattcattgagtagatgttacatttttggcttatttttctattaattaataataagctattaaaaagttttgctattagaggctgggtgcagtggctcacacctgtaatcccagcactttaagaggcagatggatcactccagcccaggacttccagaaccagcccaggcaacatgttgaaaccccatttctacaaaaaatacaaaaattagcccagtgtgatggtgcacgcctgtagtaccagctgctcaggaagctgaggtgggaaggatcgtttgagcctgggaggttgttgaggctgcagtgagccatgattgtgccactgcactccagcctgggcaacagagcaagattctgtctcgaatagataaaaatggaaaaatgttaaagttttgctattagaaataacttactacccctctttccacatgtgcctgttttgatttctgaaagtattttaggttttaaactttaattttgttataattataggttcacatacagttgtaatgaataatacggggaaaccaggtgcagtggctcatgcctgtaatcccagcactttgggaggatcacttgagcccaggagttcaagaccagcctgggcaacatagcaagaccctgtctctattaaaaacaaaaacaaaaacagggaaatcatgtgtaccttttactcttccccacaatggttacagcttacaaaactatgggacactaccacaacatgatattaatatattgaatatattgatacagaacagttccatcaccacccatcctggagctggcattttatagccaccctcccccactgccccgctttggaaatcagtgatctgttcttcatttctgtaatcttgtcattttaagaatgttataagagccggatgcagtggctcacgcccgtaattccagcactttgggaggccgaggcaggtggatcacctgaggtcaggagttcaagaccagcctgaccaatatggtgaaacctcgtctctactaaaaatacaaaaattagccaggcatggtggcgggtgcctgtaatcccagctacttaggaggctgagacaggagaatcgcttgaacctgggaggcagaggttgcagtgagccgagatcgcaccattgcactccagcctgggcgacagagcaagattccgtctcaaaaaaaaaaaaaaaaaaaaaaaaaaaaagctgggcggggtggctcacgcctgtaatcccagcactttgggaggccgaggtgggcggatcatgaggtcaggagatcgagaccattctagctaacacggtgaaaccctgtctctactaaaaatacaaaaaattagccgggcatggtggcaggcgcctgtagtcccagctactcgggaggctgaggcaggagaatggcatgaacccgggaggcagagcttgtggtgagccgagatcgcgccactgcactccagcctgggagacagagtgagagagactccgtctcaaaaaaaaaaaaaaaaaaaaaaaaagaatgttataagagtgttatataagaatgtcatataagagtattataaggcctggcatggtggctcacacctgtaattccagcactttgtggggctgaggcaggaggatcgctgtgtgggagatagccagaccttgtctctattaaaaaaaaaaaaaaagagctgggcatagtggcacatgcctgtagtctcagctactcaggaggctgaggtggaaagatcacttgagccaggaatttgagactgtagtgagctataattgcaccattgtactcagcctgggcaacagagtgagaccctatctaaaaaaaaaaaaaaaaaaaaaaaagaatgttatataaatggcatcatacgctatgtgatgtttatttttatttgtattttttatcagcttacatcatgctttgatgtcctacatgctttttttttttttttaaagacagggtcttgctctgttgcccaggctggagtgcagtagcactatcacagctcatggcagccttgacctgccaggcttaagtgattctcccacctgagcctcctgaatagctgggactgcaggcgagcaccaccatgccctgcgattttttttttttttttttggagtctcgctgtgtcccccaggctggagtgcaatggtgccatctcagctcactgcaacctctgcctcctgggttcaagcgattctcctgcctcagcctatcaagtatctgggattacaggcgcctgccactatgcccggctaacatttttttgtatttttagttgagatggggtttcgccatgttggacaggctggtctcgaactcctgacctcaagtgatccgcccgcctcgtcttcctaaagtgctgggattacaggcatgagccactgtgcccaggtgtatgttttatagatgggatttcaccatgttgcccaggctggctacatgctttttaaaatgtacatgttctctcttgacaatagtgctaaaaagtattattcccatttccagatggttcagagaggttgtggttaaaggaacttgcctaaagtcacagaattcgtttgcagtttaaacccagttcaataaaatgccaaagcttgtgcttactattcctcaaagggataatgcatgataatatacaatatacttttttctcccaataattttgaaagattagtaaaacaatagctcaggcattttctctccccaacatcctgcctttaaaccaatgaggggccctaagtggcggctcacgcctgtaatcccagcactttgggaggccgagggagatggatcacctgagatcaggagttcgagaccagcctggccaacatggtgaaaccctgtctctactaaaaatacaaaaattagccaggggtggtggtgcactcctgtagtcccacctactcaggaggctgaggcacaagaatcacttgaacaagggaggcggaggttgcagtgggccaagatcgtagcactgcactacagcctgggcgatagagtgagaatctgcctcaaaacaacaataacaaacaacaacaacagcaaaaccaatgagggagtaggttgataaagggtaaatgggctgggtgtggtggctcacacctgtaatcccagcactgtgggaggccgaggtgggaggatcacttgagcctgggagtttgacaccagcctggacaacatagcatgactccctctctacaaaaatgtttttaaaaaattagccaggcttggtggtgcatgcctgtagtcccagctactcaggagactgaggcaagaagatcacttgagcccaggagttcgaggctgcagtgagctatgattgcagcactgcactccagcctgggtgacagaatgagatcctgt

SEQ ID NO: 95315 - DNA, 151907 bp, Homo sapiens
ttaggaactgggccacacagcaggaggtgagcggcaggtgagcaagagaagcttcatctgtatttacagccactccccatcactcacaataccacctgagctgtgcctcctgttggaccagcagcggcattacattctcataggagcacaaaccctactgtgaactgcacgcacaagggatctaggttgcatgccccttatgagaatctaatgcctaatgatctgtcaccatctcccatcacccccagatgggattgtctagctatagaaaaacaagctcagggcttccactgattctaccttatggtgagttgtataattatttctttacatattacaatgtaataataataataatagaaatacagtagacaataaatgtaatgcacttgaatcatcccaaaaccattcccccacaaccccacccccgagtccttggaaaaattgtcttccacgaaactggtcccttgtgccaaaaaggttggggaccactagagaactaagcaaggcaaatgttttctttcctaaactcaagatttttcattttgacatttgctaaagacactaaattctaagagattgtgaaatgtcaaactgccctcataaacgatgagaacatttcatgagattgtgtatttcaatgcaataagtagaagataatgcatttatttaataaacccatgtaaaatgttaaaattcatcgttctctgaagtactacaaaatgtttcccaaagatatcataccagtatgctacggcagccaaaagaaagataacagctatagggaataaacacaaatagaatattgggctagacaggctcctgtttgctagagaggcattttacgtattcttactttcttttgccttttgaaaaacacagtatccagtcccattcttaacaccatttatcttcattcttactatacgtgaggggatgaaaatgccttttagtagccaagctgatgtaagtgtggaattcacatcaactgaaatcactgctaggccaagtcatcaaaatcttattgttgaattagaatctagactcagactccaaggagacatgaataatgtgtgtgctggtctttccctaaytagtattaatgaatccctgggaattctctctctctctctctctctctctctctctctctctgcatttatctccrtggttgtttcatctgattgttgcttgattttaattcaatctggcacttcttcatggagcactaaatttcttctcaacggctatacattaaactgtggtgagccctgaaggctctaccaccaacatgagttcagcctttattgctttgtgcagtccatccattcttggttcaagggtggcctagatacagagataccagttcagatacgcataggtaatgacaccaattacagggcaggatgtgtaagataagctcttccattctcttctgtaccatgctgatggactctgatacatcttcccttcaattatcaagtaggagttcattcgctgaaaggtctcatcaaagtccacgtgtcttggtggtggagttctttaatgccacacttttcaacatctttaggcttaaaatcaggagaaccatctgacatacaaaaacatcatctgttttgaaacctaaacgtttctattattggagctcctgaattaagctactgcttagaagtgtgtgtttggtgatgtgtgtgtgtgtgtacaagctctctaactttgaaggccaaatatcgaattccaaaacacaaaagagagaatttcttggtgcatagagggatatgaccacatgcaaaaacacagtttacagaaacatggagtttaacgtgttctaccacccattacttacaaatcaggagtatcttctttcaagtacgtcatgaagcaaaggatgtatggaagtggagcttctttcttacacatcattcttgttggctctgagggagtagccagatttctagaaatttctagaaaaagcccggggaaagagcaaaccatccaaaccatcccctgagattagatagaagaagggagaccatagagagcttccagtttatggtccaggcataatagcaacaatgtgctggcctcatcttccccatatggcccttcatctctcaaggacattgaacagggtgttctatttccttgcactggaaaggaaaaaggagtcatagatttctttgctgcaaagcaatcttctagagaaagcaattattccctctgcatcagtattttatcagaatcaagactttaatggtaaaataaaaggaaatgaatcctgttttcccaattgctcagcatgcatgtattcccagtctttcttttttcccctaatgacacctaactggattttaaaatgtagtttttctaagaaggaacttcatgttttcagaatgctttctcaaaaacaggagctcttctagttacaacataaatgatgctattaatttctgttatatgtacattatcttatgtgggttttgttgttactgctgtggtttctttctctttttttaagagaatatctactgacctagccatcttccgtctctaccatgtggcataaagtttcaagacagcaggctgagttccatagccatagaacacatagaaactcacagccaagaaagacagggatcaagctcacaactgtgctaagaaatactaagataaccatctgcttccagctctgttagactacaaggggcattttgttgattagcctgctaaatgcttttaaagcattgactttgwttccacaggacaaaagtagttaatcaaagactacrttagttaatgcaattttaactggaaagatgtatacaaatagatttcgacatacattgccaggatagtggaaactgtctctttttcactttacttgcaattttaatgtttctattgaaattatttatttcatttaaaaagtggaaacttagaaccacctgtattaccccctcacattgcacccacattgctgaagaagctatctatcctaggacattgggtattcatgttatttcccccatcgtgaactagtgaaagggaatgattacaattaagcacaacttagatttgagagaaaaagtaatctgtgttcagaaatcaatgtggttttattcatagttttgagtcaaatgcagaggtgagccagttcattccaactctgacattcaaagacccactgaagagcactaaacaaaaccaagcatgttattttgacacatctaactactgccatttataagtaacgactcgaaattctgctctgctttacatagctttttaaaaacctgttctaaatctatttgtactgtgtatcaattatatggataaaataagagccgagaggctctccctaagaaaaatgttgtttttgctagaaactctgcccagctaccttctgagttccttgaaaatgaaaatctctgtgtctcccagatgacagccaccttgtcggtgcaaccaaaatagctctcgcagctggagagctgtctatcagcaatagttctgacagatatcagatttggcatgcagcaggaaggctagaaatggtcccacagaaggcggtttggtgggagtatgaccagctaaggagcaaggcagggggagcactcagaaaacagtgctcctgttttcacaaggaaaactacaggcatttcgggaaatgacaaatagtcttgagggagaggacagccaaagagatggttattgacaagtctctatttccacgattagttctataggatttttgaaagggcaatgattagatagagacaagatgcaggaaactggccggtttccgttcgtgaaaggaagcaaatacacttacatgcgtaggatttttatctcctctagtggtggggtggggcctttgaggcgatagcctattactgaataataccgcttcagaaacaaagatgagcttcccttatagcgcgttttacccgtaagattaggattttcattaaatgtgttgctctcccttacagtggttttcaaaacattcccaatcttccatttgatggagtgaatcgccttttaaggatgctgattaccagcgatgaggtaacaagtgtccccctctctttttagctagagatacaagattccattctcctctgttgtcctaacaaaagtgaagccattttgtgctcagaggcaactctcctgacccctagtctgggccagaaaaacctgaggagctaaataagtaaaagaaagctagcttacctagagtaaaggtggaaaacatggaaactcagagggaagactctagtaaaggatctagagaatcatctgaaccttaaataaagggcaataattagagagaaattttggaacaagtctccaccactcccttccagtccctgtcatttttgtcattttcatccttggtcaaatgactgatacttctggtgtggcaatttagaacagtgatagtggatgaaaaagtagaaaagatggaaaaaataaatgatgacaattttaaggacagtaactaaagtttctttcttccatatggatatgcaattgaagtgtattaaaggaaaagatcaaaggttacagccaactaatcaatggattattgatcaataactgaaaatctatcaatgtgaagtatacaaaatatgcagcttttccccttgccctgctctatactcagaattaggcatcactgatgtctacttgatttctcctcttgaatgtctccaaggcaaccaaactcatatgttttctttgcaaacctgttccttttctggtttccttatctcggtggataacttcatcagccagttgtgcaaaccagaaatccaggagttatttgtttctcctagccttccaccatcatatccaatccatcagagtccttcaattttacttcctatatctatctcaaacagatccatttctctttggctctgccaccaccctaactcatcatctctcccctaaacaattactgctccaaagggcatccactccatcctttgtcaaatgcattctccacactgcactactttattcaacaaatatttttaaggaacctactttgtactgtagtgaataagacagacgaggaatttgtggaaatagaagataaacatcaggcagtcaaaagcactacgaggacaatcaaagtcgggtgatgaaatagagagtggctaaatgactattctagactgtgttcaaacacaagaaatcggtggcagttttaacaaggggtattagttttgacacaggaaaatgaaggaagtccgctgggacgatggtatctgctcctagcatataaggagtgtgtttctgatactggccaataataaaaaggaggttaaaatgtacatgaacattcaatctagggctgtttgtctccaattacctctgcttaaacatagcacttactacctatatggaagtatcttatttttgttaacttctgtatgtctcccttctttagaatgtaagctccatgaacatgcgggccataactgtcttgatctctgcagtaactacagtgcctaagagaactgagcctggcattacggtaggcatgcaaataagtatttgttgcattaacgcacaaattgctgagtgaagcaggagagtagacagagaatataacggattgggtttgggggctgaggaagtctctgctgagctgtcaaggtcatttacttccccttgcaaggttaactgggttataaaatcccggccacgctttagcaccaagcatcaagcgctcacactctaacttatacacacgctcacagccacaaacctctccaactccccgctaggaggagtcacacctccccacccagaaaccctcccaccctctcctctatttctccttccctcccctctccgcggggttccggcaggcttcgaatcacaatgctcgccgggaatagtagtcttccggtccgagcctatggcgtttttaatgcatttccagaactacgcttcccagggagcctcgcggcatagtgaggctgagtcacctgaccaagaccctggagttacaatggcggcgcccatgctgcgctggggctgccgtggaagacgttgggctttcgcccgggttgacggtggttcttgccaccgaagaggggmtccgactgggtccacatccaaccagattaggggagagagctcagtggytcagcagcccctccacacggcccagaagacgaggaaagggtattcygtttcatacatttctgcccacctaactgtgaggtggaactgcaggactggggaaataatggcaattacggcccagcttctagacgttttggctgacgggagggcgttgagttataacctggagccccgaaacctaaataaaagcacaaacagactttctatcaactccgcccccatatataaaccactgttttcaaatagatgtagttggggaattcgcgagtgtaaaatagcaaatattttcttgaagggtgcacagacagaagagtggattcggtcatcttactaatagcactagcagtggggacggtgacacgagaagcgggatcatatttagctgattttatttagcgctagtatgggctggcagcgttctaaaggtagaaagggagcctttacctacaagctcttggtagtggtgggttattgtcattagtcagaaaacactagctatctgtgcaggcgttttatgttggaatatgtgtgactagacctaggaggacgcagccaaaagaagagatactccccctggttatatggagagttttgcttatttggccagatatcccctgaacagctgtttatgcttcattatgyaagaattaaatagtttctctttaaatacagaaacatatggcaagtttctaatattttgtttattctttgagactagttggcattatttttactttcagttggaggaacagagggaaattgtccagaaagaagtattcagttttgtattcttttcgtgaattagattgtttccttgtgaatggaaagtacattttttctctcatgtaatggaaatgcaaaaatactttgaatggtgctttactgcatgcagaatttctaatgagttcctactttaattcccctcccttatgggctgtgtttccaaactttaaaaagaaggacttattcttgcagtacttcagatatagaactttatatgttgaaatgattgaaacaaaacaaaacgatgtaaaatatgtatatatatatatatgtatatacacaaaattacttgggagaagagcaggataggaacatacatggatttcatagggaataagcacatttataaggacctggagaggcctatgtacagacccaacagagtaggactgaccagataagagagattattatagcatttaacagcttcttagatttgatagcaaataagcattaaaaaagtaacctgaaattaggtctcaggaattgaaagtgatttgggggaccaaaaatrtgccgcatcagatggtttagtgtggtggagttttgcaaaatttttttaagagtatcatttagtggtgatttattgtatctgtgtctctctggttattatacatgcaaaccaaaacatggttgagaatttcctttttaaataagagacgtggaactatttatcattatttctctagtagtagaatgttgccatttatgttaattctagataatgtgggaaagatcagctttcatcatttactgagtgattacttgataagttacagttaatttgttaaatgccgcttttcactgaagtcagccaagcagttgtcacctgatacccatttctaaattgttttaagacgccaaattgttcctttctctatagccttcatgtttatatcatcagcctcctgatgccatgttgtaaatgaattttagtttgccaatctcagtgtaggcgcttattctaaattgttttttatttagtcactgataaaatatgacacatttttaatgtgaggatataacattgtattaagtttaaaacacatataggaaattaacatttgtggtttagacttatagaaattcattcatggtgacaaatataatacatcttaaccattatctctttcttcttagtgaacacaaatgggctgctgtggtaggtttggaaattcatgcccagatttcctccaactctaaactcttctctggatctcaagttcgcttttcagcacctccaaattctttggtttctttttttgatgcatctctacctggaactttgccggtaagattcttatttaatcctattttcattagaaaaatgtttattttatattgaacatggaaaattattttcttgttttaataataacacaactctttggaaatactyatttagggagttttgggtgaagcgggatatattaaatgttttctgaagacccatctctgtgatgctgtttctaagtctgaatatattcatacaygtattcatcacttcacaaacattttagcatgtctactaataccagacattgggctttgagctgggtcataaagatgatccttgcctttaaggagttcaaaaactagtaggggagatgtgtcttataaacaaacagagaacagtgtgattccttctttgaaggtaatatgcagaggatgatttcgaaacccagaggagggacaactaattcagtaaaagaaaggactgttgtgagaaattgaagtaggggtactttaggttaaggaagggttactgaagaggtggtggcctgagctatttgagaagcccaataaaatttaggcagataaatgaaggaggaggaggagtcaactcaaagcaagcagtgtatattacatgattttacagtgtaaggccagtaatgattgtggttattgcaaattaagaaacactcaataatgtagaaaacagccataatatgcagtgagttaactattgtactcacttaaccactcatttttacttgatcctatggaatgactgggcccagtatactcatcagcaagacttttggcatatatttttatataattggttgaatttttaagaaaagtatgaagggaacaagtaaatgttttagctaataaatagcatatggtctgtccaggacctataatatcaactgtgtttggggtttcctgccatctttggaggaaatgtgtatccatggtggtgacaaaggtggggagaggcagacattgtcatgggtaaattccatgctctcaaacatttaaataagagtggaagctggttgaggccgggcgcggtggctcacgcctgtaatcccagcactttggaaggccaaggtgggcgaatcacaaggtcaggagatcgagaccatcctggctaacacggtgaaaccccatctctactaatagtaaactgcaaaaaattagccgggcatggtggtgggctcctgtagtcccagttactggggaggctgaggcaggagaatggcgtgaacctgggaggcagagcttgcagtgagctgagatcgcgccactgcactccagcctgggcgacagagcgagactccatctcaaaaaaaaaaaaaaaaaaaaaaatctggaagctggttgaactgagcactggcaggcttgcagaggtatacttttctcagtcactgaccaaagtggaagattctgggcagtgcctccagtatgcctgcctcactcagctttggttgtattggggcagcatctttgtcttggaacttttctcttatcgcattttctgtcatggaggactcccttccctgcagaccatatcaaggatcacctttgatttgctgctgggtccctctgggagaagatagatgtggaggtgtgccctctttctctctctctgacttagagatctatctatggaaagattttttgtttatttgagaagagtgaatattttggttataaatatatgacatcttttttgggcagagattcagatatagtagagatacaataatatttattgtaaaatggaaggcaagttgtcataacacctctacattttcccttccagattcaaaacatttttttcccatgttgtagttaattatcaagagattaggcataagctctgagttcatcctaggtttttccagctgtgaatgtgatggctatcaggccatacttattacagttcactttagaaacaggtccatttgcagataagcatgttttctgtatatagactctccagctgtacctaaatttggtcaaaaattagaccaaattagaaaaattcaaaataattaaaatgccaacattttaattgctttgtaaaacttgtcatgcaccaaaaaagaaggtgcttgttcactgataagcatatcaataacacagtgaaggtgtttgggacatttgagtgttgagagcttggcttacattaattaaatggcagacaaagtctggaaatacagttttgtatgagctaggatttgttttcctcttcagagcctacaacgcttatggtttaagtagcctagatgggttattctgtagacagaggagatctacctcttcttcagaaatgtttctgcctttaagggacctcattttgtacgtgagcaacattatacccaaactcccagaattaagcattgccattcaaaacatttcaaaatcttttgatttacctctaaatagatttaaaatacactaaaacctttagacagttgtccttcccctaagccctatggagatgtataaacatgctctgatagccagactctgcttataactccattcataagaaaccaataatttgagaatatgtttgtgcttccgaggattttagtagaacattatgttattgttttggtcaagtaaaccaaagtgtaagtgtgattcatgatgatacttgaaactctttctgcgcagggcttatattgctcccttctctcctgcttcttccccgccctctacctggctgattgtgccttctcacatggctgtgttctgccactcagccctgaaatgttggtttcccatgccctattctttggctctcaattcttctgttacctgtgttcccctgagtaatctttttaccctcaaataaagctcccctctctcttttaggcaagaaacctatatctattgtgtcctactatatatttccatctgaatgattcataaacatcttaaattcagcagttacagtgttaagcctgttatcttttctccccaaagtttcactgcctcctgacgaaagaataaaccaacaagggaaaatatatgtaagaagaagcaaaaatcagtgggaaaaggataagttatttaactgatggttttggaattggttagctatttggagaaaaagtatcgctcatttcacacatcaaaacaaagttcatatatatataatataagttaaatgtcaaattaaatccagaaatatctaggagaatatttgtttgtccttgggttggggagaaactttgtaggcataaaagcaagaaaaaacagctaattaggcaaaatggcaatttgactactttattcgcccaacatgtttattgacgtagtaattcttttaggaatctgtccttggaaaataaacatgtgggcaaagacttatatgcagagatgtctatagcagatctatttttaaaggtagaaaattggaagtaaccacagtttctcagtgatgggggaatcattgagtaaattataatacatcagtacagtacaacattatgaagccactgataatgtttataatagacttttagtgacataggacaatgctaaagataaaaattctagtgagatgaatagaattttcatgtagattacttaatcttctttgcatcagtttcttataaaatggagataattgactcattggatttgtgtgagaattaaatgaatcagtacctttaaaacacttaaaacagtaattgcatgtagtaagtgctcttattaattaacagataattaacaagtaataacaggtaattaattaaaaagctcttaataataggtaaggtaaatcttacctgctagcatacccataatgattggtggcttttatctttacaaaggctctcctgagttattgtgcacagttacgttgccagtgagagcaaaagtaaatgctacacataacaattggtcacttaaccttgatttcaccagttaagtgatctgccaacaaaaactaacctgggtatctcatcacctcagagatgtatagagaattaagtaaataatgaaaaccagtaaaaactagtatatggataaaattatttctgaattagaaatcattacttttattgcgaaaaagaaggcttatgagcttttttttttccatctgtagttatttggagtgtttctttggttcaacatggtattggctcttgatttagtaaaaaattaggattgtcacttaaaacaattgttataatgtatagtctttctgtagacatttcattcttcttctctgtcggttgtgtcttcattcactcagctggcatatattggatgcccacgttatgctagcccttgtgtagctctagtgacacagttttgaacttggtagacgatagatatgggtgttgcccacatggagcatgaacaagcaagcaggcagttgcactaccttttaataaacatgttagtcgtggaaatacaaggtgcttgaggagcacataggaagagtattcaacacagatataaggaattgatgaaattggccaagtagaaagtgaataggatgtacaaagaccagaagraaaacaacgtggcttgctctagaaactgaaacgttttccatgtgttgtagcatagaatttgaatatgggcattgcaagaggtgaggctagagcagaaagcatagcctgtaccatataagccctgataaagggtgtggatcccatttgcaaagaggtaagaagacgtaaggagagtgcagggccagaaactccaaggaagtgagtgttttgagaaggagggagtacaagaacattggatgctactgagaggtcaagtaaagtgaggactaggaagtgcccattggatttattaagaagggtatcctttgcaagaacagtttgagtggggtgatggaaacagaaggtaggtggcagtggattgagaaatgtcatggcatggaggaagaagtgagtgtgggcaactgtttcaaaaagttttactatgaaggacaacagaatgcagcaagtgaaaggagacatagaatcaagagaaaacatttattggtcatgtctttcttaatattggagagacttgggaatgtttaaatgctgatgagttatgtagtctatgatagtgtacacttaaaatgtgtttaagaggatagatctcatgttaagtgttcttactgcaataaaacaaaattttttaaaaatgctgatgagaaggagccaatgaagaaggggtaaagacaggagaggcttttgattaatatgatcaactgaacacatgcattttaatccatcctctctgtaacccagagaaaccccactgaaatcatagtgaaagaatgcaaatgtgataagcctacaaaagaatgggagaggagacaagagtgtgtgagagagagatggtaggtggaggagggcctcactttgcagaggatgcactgtgacctaagtgcctgcaggaagggacactagcgagaactgagatgatgtgtcctacacaaccttaaaaacgctcaggatgtgggggcgtcaagtattgtggaaggctggctgaggtgaaaacaaaggggttgagtcagagtctgagtacagtgcagtgagatctgagcttctctacctgaccctctgcagctgccctacccccataggaatgtatagtctttggagaaattcagctcatgacacactttccctgaggccaccagtcagagcaaaaggcggtatcagacagcatctgtagtgaactccaggacctacccagttcttttccctgccccagtgcgggaacttaggtggcctggtatgtccatctttcctcttcccctcctcccccaagcaagaatctgcaggagcttctttgaagattgtgtgaccctagtgggaagaacatgagatattgacatggtgggatgtctctcaatttaaaaaaatctgtctggccacctgattgctttacagtgaaggccactgatgaataagccctgggcatttacataggacttttaattggcattttagtatcttactttaaaatatagattgagagccaaaaatcaccaggcacttgaggagattctccaacatgatagacaaagctcaaaataaaaaagaaaactaaaggaaataggaggctatagataatgcacagggtaaaagaatacttaaaaaattaatagcttttataaatgtcctcagagagataagggaaggtagctgcctctttgaaacaagaacacaatactgcttttaaaaaatgaacaaacaggataaaaacgagctcttagaaattaaaattatggtgcctctccttcccctgggaaagttagaaaataatgtcaagaaaatcttccagagatcaaaaccaatgtgcagtgcattggacaatagaagaaaaaaataagcaaattagagaatcagtccaggaagttcagcatctgattaataagagactcgtgaaaaaatagaaaacagagtcaaggaaactctcaaacaaaacacgtggattaatttcccagaattgaaggacatatatctctaaatggaaagggcctgccaactacccagcctgaggaataaaaatagtctaacatgaaggcatgtcaagaaacttaataacactgagaataaagttaaggtcctaaagcttacagagaagaaaaaaataatcaggtccacatacaaaggattgggagtcagacatcagacttttcaacagcagcacttatacctgtaagagaatggaaccatgccttaaacattcttaggggaaaaaaaattataattctaacctagaattcggtacccaacagtgtcaatcagatgtgacagtagaagaatggtattttcagacagactctcaaaaagtttgcctttcattaccccaggaacctgctggaataatagagaagtttcaggttgccagctctaccatgagaccgttggaagaggaggaaggtggctccagaataaagaattctaggaaaaaatgagagtagggaattarcaggtatctgatttgtgtggaaaaaagatttccatataatctagcctttagaggaatgagcaataggtacataaaaaatgaagcacatgaaaacaatgaagggcttagcaagtctaggaaaaacaaaatgttcmagaaaggaaatgtaatcatagtgttttattagcttaggagagaaacatgtaaataataatagaagcaccagctactgatttaataaaaactgtgatataacttggatattgggaaaagaactaaattcttacctaccataattggaagtcatgttctaaattggtaaagcaagaaaaaagtaacctaagtataggctgtaggaacatttttggccactgattggaggcctctttctccttttcaggccttaagccagtagatgggttttattttgttgtgtttttctttggcggtgaggtgggatgtgggattgtatttgtgttttgttttgttttttaattaggtgatgggtaaatgatttggagctcccaagaaacagactagtagtcaaaagcatttttaaaaacaagatttatttttattttatatacaagataacgttaggtaataatcaaacattacctgtactggtttctcagccttctgctggtgaagtgcttttcattttgttttgttttttgttctcaaagtccaaataatgagtcccctaccacacccctgttctcacaactcttacccttaccctgattttaggagaaatagactcatccacattctagatccatccatactcaagctcatgcatgtaatggctctgtctgcttccctgggggagacatgacctaccatccttttttctaactgactttatggacttttatgttacccaacttctcatggcagggcttttagggagtgggtatattttatttttggatagaaatataatttagcagctaggcacagtggctcgtgcctgtaatcccagcactttggaaggctgaggtggttggatggcttgagcccaggagttggagaccagcctgggcaacatggtgaaaccctgtctctacaaaaaaaaaaaatacaaaaataagtcgggcatggtggtgtatgcctgtagtccgctgcttgtggggttgaggtgggaggatcacttgagcttgggaggtgtaccacggcactccagtctgagtgacagagtgagaccctgtttcaaaaaagaaaagaaaagaaaaaaatataatgtagcagcaagcttgggtaattctttgataaagtaagatataaaaatattgcaaaatgtctcatattgttattctcttatcttgtaacttatctcagttatctctcagaaatggaatgggccaagtcttaggagtccacgttcttaaaacaagtacactgtatcattgtgacagtttatcaaatctatcttttttccagattaaggaaggattgtcacatagcaaatggccaggagccttggccaacaggtgatggattttccaaaggtcccctggcacagcatattatttaaaaataggaagataaataccaaacgagacagctcaaagatctgaaggtggttgctgccaggaacaggacgggacctaggaaggggtggggcggggractgctgcttttcatgatcagttatttaaaaatacatgtctgtgatattttgtttaaaaaacttaagttaggggctgggygtggtggctcacgcctataatcccagcactttgggagaccgaggtgggcggatcacgaggtcaggagattgagaccatcctggctaacacggtgaaaccctgtctctactaaaagtacaaaaaattagctgggtgtggtggcggacgtctgtagtcccagctactcgggaggctgaggcaggagaatggtgtgaacccgggaggcagagcttgcagtgagccgagatagcgccactgcactccagcctggcatgagagccagactctgtctcaaaaaaaaacaaaacacaaaaaactgaggtttaaaggaataaagatataagggggagggaattgttgatagaataaggttcctaagaaagcagacaatgtctccagagctgtggagaaagagccctctcctactgtaacccgaggggaagatgtgtccctctgctcccaggtgtgaggaagttttgaggtttggttgtcaaaggttgaggaaacacctctctgatttttttcttttttctttttgttttattatatatatatawttatacttkaagttctagggtacrtgtgcacaacgtgcaggtttgttacatatgtatacatgtgccatgttggtgtatttacattaggtacatctcctaatgctatccctcccccacccccaccccacaacaggccctggtgtgtgatgttccccttcctgtgtccaagtgttctyattgttcagttctcacctatgagtgagaacatgtggtgtttggttttctgtccttgcgatagtttgctgagaatgatggtttccagcttcatccatgtccctacaaaggacatgaacttatcattttttatggctgcatagtattccatggtgtatatgtgccacattttcttaatccagtctatcactgttgggcatttgggttggttccaagtctttgctattgtgaatagtgccgcaataaacatacgtgtgcatgtgtctttatagcagcatgatttataatcctttgggtatatacccagtaatgggactgctgggtcaaatggtatttctagttctagatccctgaggaatcgccacacttgtcttccacaatggttgaactagtttacagtcctaccaacagtgtaaaagtgttcctatttctccacatcctctccagcacctgttgtttcctgactttttaatgatcgccattctaactggtgtgagatgatatctcactgtggttttgatttgcatttctctgatggccagtgatgatgagcattttttcatgtgtctgttggctgcataaatgtcttcttttgagaagtgtctattcatatccttcgcccaccttttgatggggttgtttttttcttgtaaatttgtttgagttctttgtagattctggatattagccctttgtcagatgggtagattgcaaatattttctcccattctgtaggttgcctgttcactccgatggtagtttcttttgctgtacagaagctctttagtttaattagatcccatttgtcaattttggcttttgttgccattgcttttggtgttttagacatgaagtccttgcccatgcctatgtcctgaatggtattgcctaggttttcttctagggtttttatggttttaggtctaacatttaagtctttaatccatcttgaattaatttttgtataaggtgtaaagaagggatccagtttcagctttctacatatggctagccagttttcccagcaccatttgttaaatagggaatcctttcccgatttcttgtttttgtcagttttgtcaaagatcagatagttgtagatgtggtattatttctgagggctctgttctgttccattggtctatatctctgttttggtaccagtaccatgctgttctggttactgtagccttgtagtatagtttgaagtcaggtagtgtgatgcctctagctttgttcttttggcttaggattgacttggcaatgcgggctcttttttggttccatatgaactttaaagtagttttttccagttctatgaagaaagtcattagtagcttgatggggatggcattgaatctataaattaccttgggcagtatggccattttcacaatattgattcttcctatccatgagcatggaatgttcttccatttgtttatgtcctcttttatttcattgagcagtgatttgtagttctccttgaagaggtccttcacatcccttgatttttttcattttgtagcagatattgcttcttacatctcactctgcttttgggcaccgttttcttcctgtgttggtggctcttgctttccaggtctgtgggtgatgaactctcttagtctgtatgtgcctccagctgtttctgtttccccctcactctggaatagtagtatagaattccaacttgacatttatttcccgttggcacttgaagacatttttccattgtccttaggcatctgtaattgctgatgagaagtctgcatcccttgtcagtaatctgttgtgtcactctgatagctttagccaggatgtgtccakatgtgaatttgtttttatttattctgctcagtgtgatttttaacttaagtactgtaccctggactatggaggtatctctatggaatgaattcctggtggcctctgccagggcccattgggttttattgaatgaaccggtttgtatgttaatttcttggccccctaactgccacacagcttagatagtgccagcgtcaagctgcacacatccaagccaggcacagggtcaagggctcagatttctcaagactctttttcacctatggcctgaagtagctggcctcctccacagcaacccctccagttggtggcaaaaggttttctaactggactagaattttttggctcacagctttatgcaggaagccatcccagctccctatcacatgggctcatggccttgacttctgcccccaaggtgctttaaagcattgacatctgatgtctcatcagcccagttaacaataataatggtagtaaaatcaactaccatgtaccaagtgcttaccatgtggcaggcactgttctaggtgctttatatgtattcacttattctaaccycataacaaccctacctgccgcagttgctgtccttatcacagttagaaagtgagtagaaaatgtgttgtcctgtctcttgtggttacccctggtgtcacatggctttaaactaccattacttctgcggccccaggggattttcttgcttgctttgagcttggctctgggcatgtacacatctgtgtatttgtaaatttatatgtatatataaatgtatgtgtgtataaatagaatacttcatttctgcctcctgcctccatctccctgttccccagcatgtctggagcacacctgctgtcttgaccaaccccctccccgttctgattagtaacccttattctgaatgttttttaggatctttttattttcttattttccctcagttttaggattttatggaagcccatcataaatcttgaggatgaaaaggtcagccagcccatttcactgcttataggcaggattacagctacactaaggacagcattctttgtttttattagtagggattcagcttcactcattatttggacctagtaaaatctctttactgtggtgccaagtcttccttaatttattaagtaattattcacctatagatctatagacaggatcttaggttgtttgcttaaagttagttatttcctatttaacaataccattccaatttttctacttgtaatactttgtatatggttgtgaaatgggaagaaaaataagaaagaaaatatatttgtttggtaaaatgtcatgggctttacaagtctgtttcataattggccaagtaatatttccagtaatggtgagatttcagcaaagaatcaagtttgtttgaaatttatgcatgtgcaaacccatgtttacacatacacacacactcactttttgtcatcggaaatgcttgccctctcctggtgtcagttcccacgcaggggaaaggggagaggacaccgttgcctctgccgtagctggctggtaggaatgctcagtgtggcacagtagataactcctgataatcaggctgcactacaattcatttaataagaaatgagaagctctgctcttgttttgcttgtctgaaagctcttatctgtatgtaacatagaactccctagcaactgtgaatgcctcttgtctccagaactggggaaaagaccataaaagctgtttttcacacatgtatgcaagaatattctcctcttttctcaggatcagcctgtttaaaaaagcattcagggctttccatatcaaaggtatttagaattggccctggaagctatggaatgaaaacaggaatgttgtttactacattttacaaaactttcttttattcacaagagtgcatactattattagccagaataaggggaatgaagaggggaagaaatatgatgtgaataaatatgatgtgatgcctgccctctgggaactaacaaacaatgcaaatgctgtgctttctgctagagattccttctggaacatatgtatgcacattgcagcagaaggggtcttgcctccctgaagaaatagtgatgtgaacgcttttctaaagtactttggaattaatttattttttagattccttatgacagatttcgttcaagctaggtaaatctgcagcattccgactctgaacatagaagatattggtgataacttttgttttgaagaacctgctagatttagaaacccttgactagtctagggagcatcaggctttctgaaatgcttttctggctcttaattctaaacataattataaaagttgtttttaactcaaaatgtagaaatgaaacagaaattgaagatagcatcattagggaaaagtctttaaatacgtacatttataatcagatctacatttatctctccgtccattcacacttagatgatgtttagctatttaagaagacaaaatgtgaccattttctatgaaatttctttccatttcaatgatttgctttaatgtaatctgaaagatttataattatgttgtatactcagacttgcttcttgccagtcactctgcaaatcacttctatagttatcctccatgcttttgagagtgaggtgttgcagggattaggtgttttgtatagtgacccttgtcaccctaaaggaggtatgtgtctgtgagctcatacccacaaatgtggaatgttccttttcagcttttactctgctgatggtctaaacctgccttataacttagttaaccggatgtctcccatgaactcagtgactcatgacaatgatgactttcatgttcaggaggcagcatgatctcacctccctccctgtgggaagcatttgactccttccctgccatagatctttttctaactttcagtgggttcttgaaagcctctctcttcacagcaattttcacttccctacctctctaccagctttgcatgcaatattccccacctgaaacctaaccatattaataataatgcttctactatttttatttttattttttttagagacagggccccaccatgttgctcaggctagtttctaactcctgggttcaaggagtcctcctgcctccacctcgcaaagtgggattataggcatgagccaccatgcctggcctctactttctatcaatatgtatttgtttcatacagttgactgaacatctttttatgttttatgtatgttgtttataaggatttctgtgtttgattatacgcttctaaagagcaattcatggatctttcttgggctacttgacagtaccttgcatagaacatgtgtatagcaccccttgtaaatatttccctatatacttgcatacacgtacatacacgtgcgtacacacacgaggcatccatataaaaggattttcctgtctaaaaccctttagctattttttaaacttctttatgggtctcttgtcctggctgaacataagacaaccttttcttgattacccaagcttatcagcaacatcagttattgctcagtgttataatggtggcttcaaggtctattgaggtgtgtaaagctttttgatcctacagtaaatggctaaagatagccattgtttttaggtttcatattacagtgtttttccctgcttttatggttatgtgttcctcactgggtttttaaagctgctgtcagtatatttggctctaggaatcccttcttgctcatttttcacttctcaatgattatttctgattagttcacaaagtcagattatcacttttgtaaatataaataagaacaaagctctgagtagaaacctgtcctacaaaagaaagtacatggatgctatgaaagctatttagcatcaccatgtgacaatagaataggaagaggtcctgaaaatcattcagttcagtccttttaatttacagatgagagaactgctgttgggacttacccatggtcacacaatttcttaacattccattcagattagaaccaaagtttctcacttccagttcagtgattagctctcaacctgttccactatagttgaagttgctggaagtcagatttatgtaggtggctattattttacagatatgtatatatgagtatacatccaaaaacattaatctcattaacagatgtgtgtgtaatatgtttatagatgtatgtccacatgcttatacacatacagaggcactgactacacagcactgatgctggttgtatgcaccatgtgttatgatgccctctaggtgtgagatctaaacctagggagagagcaaagacaagaatgttgagtcagaagaagaaatggataaaggaaatctcacctaattagcctccaattcagggccctgtgcatcggatttccccagactcaccatgaagaaagcaggcctgtctatgggcagctcttagctgtatgttgatcacgatgcaaatagcggtcatgggaaaattcttttaggatcttttctctaggcttcattctggccagttttctctacactgacttctagttcactaattttctttataatattcactcttttacatatccattgaggtttttagttcactagatctttcaattacagaaattctgtttttctcttttaaatttctctagccttttgaaaataacttgttcctttttcatgtattcagttctttatttctttcataattttacagctacttattttatagtctgtattcagtaattccattacctgaagttcttgggtgatcttattatgctttttgcttgactgctgattctggctggcagtagatgattctctggtgtattttgtaatttttttattatgaagccatatctgacagggctttatttgtgggatcttgttgagagtgcatctctttaaagcacttttgcattggcttttgcctgatgctccaggtctaagccagggccattttccatatttacctcttagcttgggggcttctggaccacagagttagtacatctgaccccaagcctgtctgagagcagactatcaattcttagggcagactcccataccccctgtcccattgccacccaccaaaatctataatctggctgaaactttattaaggttgaaaccttatagaagggaggggatgaaacaaaggctgtgaatatgggtgactcagaatggagcagggaaggcacctttaacctttctctggcccccttgccctgtcccattaagatatccctcccagccgggtgcggtggctcacgcctgtaatcccagcactttgggaggccaaggcaggcggatcacgaggtcaggagatcgagaccatcctggttaacacggtgaaatgccgtctctactaaaaatacaagaaattagccgggtgcgatggcgggcgcctgtagtcccagctactcaggaggctgaggcagaagaatggcatggaccggggatgcrgagcttgcagtgagccgagatagcgccactgcactccggcctgggcgaaagagcaagactccgtctcaaaaaaaaaaaaaaaaccatatccctcccttcccattgtaattcttctgtgttgttgtgtatgtattgcagttcacactagttagggccaaggttggtgcacatcccagtaccttttatctgtcctctcatcacagacacagatcaggtgactgagctctttccaaattcccgctagatgtgcaaggatgcactctctcacttattgcctttaaagatgatcattttcccaaaaaaagcttcatccttaataaaatgattcccttaacctttgtgtagaaatgatgatgccatctcactcctcctaaagaacaacaaaaagcaatatgatggtgttgacaggagcagctggctctagtgggagaaatcaatgaggaaattgagagttcgctttcctctccacctgagccttggcgaacctgagggacctcgtctggcctccccctgggtgaatcttctgggtctgcagagcatctccctgactcagcagtgtttcttaggagcttgatgttcctttcctagtaatggaagtctccaggcagcttgctcatctccccacaaattcattcctgagcaagaaactgccagtattgtttgggaaagccttttctcccatttccacatccttttattggtttgttttccctcaaaaatatgcacatggatgagatatggagcaaaataataagcccttattagagaaggcagtgttatacttagaattattaactgttcaaaatgaattttgtacactactgcaaccaaaaatctgtaatacaatagtactcccttatctgtagtttccctttgtgtagtttcagttaccctcagtacaggagaataagatattttgagagagaccacattcatataactttgattacagtatattgttcttttttattattgttgttaatctcttgctgtgcataatttataaattaaacttcatcatacatacctatggataggaaaaaaaatagtctatatcggacttggtaccatccgaggtctcaggcatcccccaggggtcttggaacctatccctcatggataagggggcactcctgtactggaaagagaggtaggagtgtgcagaaaataaagtatgaacacattaccaaagatgcctgagagtacaaaagcttaggagtcttttggtgatataaatatgtagtagtccaaaaaaaaaacctaacagtgttctgtgacactatttttgtctctgccattcgagtagttcatacaggctttgttctggtgatttatactagaagcctataataaaaacgcagcctgaaatcatgcagctgggtaccattcatttttcttccatggacagttcccgaacttaacaaattacggcaggcctggcaaagctcttcctgcaaaggcaatacatgcctggccatggcagctgccctcttgggtttcttctgctttgtggcatcatcggtgatgctgcggggattgctagatggtttttatgagtacatcatgtactgcataatgacattttggtaacaacagactacatatatgatggtggtcccataaaattacagtggagctgaaaaattcctatggcctggtgatgtcatagccatcttgtcatcatggcataatacatgacaatatgtttagatacacaaatacttactgttgtgttacagttgcctacagtattcagtacataacatgctgtacaggttagtagcgtaggagccataggctataccctgtagcctaggtgtgtagagggctgtcccatccaggtttgtatgagtacactcttacgatgttcatgcaacagcaaagtctcctaacaaggcatttctcagaacatatctccattggtaagtgatgcacgactgtactaggaaagagtttctaggaagatattgtgtagttttagtgggtcaataaaaataatactcgcttcctgtcttgagtcagaaccaactgagaaatcagcacagaagtcagacagatggaaatgaacataccagctttattacagataatagcttgattgaaaaatgcaacgtgatgtttagccatatgctttttagtacttgctgcctctgttgaactcagctttccaaaactgcaggcttttcacttgtagaggacgaacttgcttctgcagaaagcttatcatgtcgccagagtagagctgactgtcccatcattgtgggcatgttgattaggaagaactcatgcaggctttctcctgataatttatactataagcttctataggaatgctcagccatggggccaacccactcatgtggttccatttcccaaagtcacttgtcacaaaagtcactcttttggggacaagagaatacagagtagaaagcaaagtcctgtcacatggaaacctaggggcaggggaatgaccgttgcccaaattgtgccctcaaaagcatgaagccagtgtcacatcatgtctgggcatagatgtgagaagctgtttttgggtgagtcttgcggaattctttgtttatactgcaagtagatgcacttgtcatctgaggccattggcttggcctctcttggccatttttatgtgtgtttgcggcttcacatgtaacattgtggggagagttggctattttctacgctgcggcatcttggggagtttttttcctcagctcttttaaaaatcttggcaaagttaggaggtcattttgccattggcataccagagatgacaaacgtaggcttggtgattctggcatgggtaggtagtcaggctgggctcctctgaagagcattctgttcctcatggcagaggattcttgctagtgagcctttgtgttccccagcctttcaccactgggtacatcattataataaggactggagctgaggcagggagaataactgggaatcaaaaggcattagtgcttctgggagccttaaaatattctattctaaatttttatgcacgtatctccttttacaattatagaagcaagaagcgtaatcaatcaagggtctttgtcatgctttgcagctttcttaggaaatgcagacaggcaataatatgtgattgtcaatagcattttgaattttcagtgatatttgccaactcataggccatcccaatgagcaaggtcaggggctccaaccccagttgataggagaggaaactgatggtcttactgacttatccaaggacacaaagaggtcatgaacccagctaaaaatagaagtgagaattgcctggtccctattcttagtataagcaccagattacactcgctgctgcaatacttgctaattgttcatttccgacaaaacatagcggggaatttttcctttatagctggttgtaaacatttaagatgcctgtagtcactcataacctctgtttacttatcacagccagctagctatcttatttaccttatctctgattctttttcatttttacatctgtgcagagaagttaatatatgtgaaagcacttcatagactctcaagtagcacataaattttatttggtgttattataatacttgtattagtcatttttacactgctgataaaaacatacctgagactgggcaatttacaaaagaaagaagtttattggacttaccattccacctggctggggaggcctcacaatcatggtggaaggtgaaaggcatgtctcatatggcagcagacaagagaagacagcttgtgcaaggaaattcccatctttaaaaccatcagatctcgtgagacttactcactatcgcgagaatggcacaggaaagacctgcccccatgattcagttacctccaaccaggtcaaatcttaaatctccaaaatgatctcctttgactccacgtctcacatccaggtcacgctggctgatgcaaaagatgggttcccatggtcttgggcagctccaccctgttgttttgcagggtacagtctccttcatgattgctttcacgggctggcattgagtgtctgtggcttttccaggcacacagtgcaaactgtcagtggatctacctttctggggtctggaggaaggtggccctcctctcacagcgtggtaccccagtagggactctgtcttggggctctgggggctctgactccacatttcccttctgcactgcccagcagcagaggttctccattgtgaccccgcccctgcagcaaacttttgcctggacatcyaggcatttctatacatcgtctgaaatctaggtggaggttcccaaaccttggttcttgacttctgtgcacccacaggctcaacaccacgtggaagcttccaaggcttggcagcttccaccttctgaagcaacagtccaagctgtacctttgccccttttagtcacgctggagtggctgggatgcagggcaccaagtccctagactgcacacagcaggggcaccctgggcctgatccacaaaaccattttctcctaggcctccaggcctgtgatgagaggggctactgtgaagacctctgatgtgccctggagacattttccccctgtcttggggattaacattctgcttctcattacttacgcagatttatgcagctggcttcaatttctcctcagaaaatgggtttttcttttctaccacattgtcaggctgcaaattttccaaactttatgctctgcttcttttataaaacggagtgcctttaacagcacccaagtcacctcttgaatgctttgctgcttagaaatttcttctgtcagataccctaaatcatctctctcaagttcaaagttccacacatctccagggcaggggcaaagtgccaccagtctctttgctaaaacataacacgagtcatctttgcttcggtttgcaacaagttcctcatctccttttgagaccacctcagcctggaccttattttccatatcgctatcaggcttttggtcagagtcattcaacaagtctctaagaagttccaaactttctcacattttcctgtcttcttctgagccctccaaactgttccagcctctgcctggtacccagatcgaaagtcacttccacattttcaggtatcttttcagtaacaccccactcctggtaccagtttactttattagtccatttttacactgctgataaagacatacctgagactgggcaatttacaaaaggaagaggtttattggacttacagttccacctggctggggaggcctcacaatcatggcagaaggtgaaaggcatgcctcacatggcagcagacaagagaggagagcttgcgcaaggaaattcccagttttaaaaccatcagatctcgtgagacttattctctatcacgagaacagcaccggaaagacctgcccccatgattcaattacctcccaccgggtccctcccacaacatgtgggaattcaagatgagatttgggtggggaacagccaaaccatatcagtactcatgtttttaactttgcatcattaaaatgtgagcacagatacttccacttcatagtggccaatagagttgggctgggagtggcagtggtaaacacttacatcatactatcctgacataacttaggatggcatgtattcacaacagtatgagtaacaattaatgagaagttttcagtcacagatgtctttcagagaagcacaaattgataaatatacatatacatttacatagtgaggcaacagaatggaagcactgatagaaaataagacacacatacagctttgggggaagctaaaagtattttcagctagaaaatatataattggggaaaattattttcctaccagttaaaagaacaaatcttcctttcatactcttgattatgcatgtatatggtgtctatttgcagggtttatatacttttctatagatactgtggaattctcttaacagattttggttgcaccatacttgattacatacacaagggccttaataatatcccatagcttaattgaatctatggcataggaaagtttaggtagatagctttaatatgtaatgttttctttctagagctgattttcagcagcagtgaatggaagtggcaggatgtggggtttacaagtcagcattagtttcttcttttttttcccattagttattggggtacaagtggtatttggttacatgaataagttcttcggtggtggtttgtgagatcctggtgcacccatcacccgagcagtatagactgcaccatgtatgttgtcttttatcccttgcccccttcccactcttcctccgagtccccaaagtccattgtatcattcttacgccttagtctccagtcccatccaggtcattgcaaatgctgttaatttatttctttttatggctgagtagtattccatcatatatatatatatatatatacaccacagtttatttatccacttgttgattgatgggcatttgggttggttccacgattttgcagttgtgaattgtgctgctataaacatgcgtgtgcaagtatctttttttttcaaataatgacttctttacctctgggtagatacccagtagtaggattgctggatcaaatggtagttctacttttagttctttaaggaatctccatactgttttccatagcagttgtactagtttacattcccaccagcggtgtagaagtgttccctgattgctgcatccaggccaacatctactgttttttgattttttgattatggcccttcttgcaagagtaaggtggtatcgcactgtggttttgacttgcatttccctgatcattagtgatgttgagcattttttcataatgtttgttggccatttgtatatcttcttttgagaattgtctattcatgcccttagcccactttctgatgggattgtttgtttttttttttttttcttactgatttgtttgagtttgttgtagactctggttattagtcctttgtcagatgtatagattgtgaagattttctcccactttgtgggttttctgtttattctgctgactgttcttttgctgtgcaaaagctctttagtttaattaggtcccagctatttatctttgcttttactgcttttgcttttgggtttttggtcatgaaatccttgcctaagctaatgtctagaagggtttttcaaatgttatcttctagaatttttatagtttcaggtcttaggtttaagtccttaatccatcttgagttgatttttgtataaggtgagagatgagaatgcagtatgattctgctacatgtggctaaccaattatcacagcaccatttgttgaaaagggtgtcctttccccgctttatgtttttgtttgctttgttgaagatcagttgactgtaaggatgtgggtttatttctgggttctctattctgttccattggtctatgcctatttttatgccagtaccaggctgtgttggtgactgtggccttatagtatagtttaaaatcaggtagtgtgatgcctccagatttgttccttttgcttagtcttgctttggttatgcgggctcttttttggttccatatgaatttttctaactctgtgacgaatgatggtggtattttgatggggattgtgttgactttttagattgcttttggcactatggtcattttcacaatattgattctacccatccgtgaacatgggatgtgtttctatttgtctgtgtcatttgtgatttctttcagcagtgttttgtagttttccttgtagaggtccttcaactcttttgttaggtgtattcctaagtatttttttttttttttggcagctattttaaaaggggttgagttcttgatttggttctccatttggtcactgttgctatatagaagagctactgatttgtgtatgttaattgtatctggaaactttgctgaattcttttatcagttctaggagctttctggagaagtctttagggttttcaaggtaaaagatcatatcgtcagcagacagggacagtttgacttcctcttcaccaatttggatgccttctatttctcttgtctgattgctctggctagggcgtccagtactatattgaagaggagtggtgagagtggcatccttgtcttgttccagttctcagagggaatgctttcaacttttccccattcattattatgttggctgtgggtttgtcatagatggcttttattacgttaagttatgtcccttgtgtgccagttttgctgaggatttaattataaagggatgctggattttgtcgaatgccctttctgcatctattgagatgatcatttgatttttgtttttaattctgtttatgtggtgtatcccatttattgaattgcatatgttaaaccaattctgcatccctggtatgaaacccacttgatcatggtagattatcttttttatatttgttagattcggatagctagtattttgtaaggattttagcatctatcattcatcgaggatatattcttttttgtttgtgtcctttcctgattttggtattagggtgatgctggcttcatagaatgaattagggaagattccttctttatcttgtggaatagtgtcaaaaggattgataccaattctttgaatgtctggtagaattcttcagtgaattgtctggtcctggactttttttggttggcaattgttaaattaccgttttaatctcgctgcttgttattggtctgttcagggtatctaattcttcctgatttaagttaggagagttgtatttttccaggaatctattcatctcttctaggttttctagtttatgtgcctaaaggtgttcatagtagccttgaatgatcttttgtatttcagtggtgtcagttgtaatatctcctgtttcgtttctcagtgagtttatttggattttctctcttcttttcttggttaatcttgttaatggtctatcaattttatttatcttttcaaagaaccagtttttggtttcatttatcttttgtattttttttgtttgtttcaatttcatttagttctgctctgatcttggttatttttcttctgctgggtttgggtttggtttgttcttatttctctagttccttgaggtgtgaccttagattgtctgttggtactctttcagactttttgatgtaggtgtttagggctgtgaactttcctcctaacaccttcttagctgtatcccagaggttttgataggttgtgtcattattgtcattcagttataaaagtgtgtccaaagtttcctgaattttttagtttttttaatatttatctttttatttctacatagtttttaatataattttagcatctttttatttttccatgtttttgaacaaaattataatgatagtattcacagatctttgtttcttaatttttctcattaaaattataaaaattctttttttttttttttttattgatcattcttgggtgtttctcgcagagggggatttggcagggtcataggacaatagtggagggaaggtcagcagataaacaagtgagcaaaggtctctggttttcctaggcagaggaccctgcagccttccgcagtgtttgtgtccctgggtacttgagattagggagtggtgatgactcttaatgagcatgctgccttcaagcatctgtttaacaaagcacatcttgcaccgcccttaatccattcaaccctgagtggacacagcacatgccccagagcacagggttgggggcagggtcacagatcaacagcatcccaaggcagaagaacctctcccagtacagaacaaaatggagtctcctatgtctacttctttctacacagacacagcaacaatctgatttctctatcttttccccacctttcccccttttctattccacaaaaccgccatcgtcatcatggcccattctcaatgagctgttgggtacacctccctgatggggtggtggccaggcagaggggctcctcacttcccagaaggggtggccgggcagaggcgccccccacctcctggacggggcggtggccgggcggaggctccccccacctccctcccggacggggcggctggccgggcgggggctgacccccccacctccctcccggacggggcggctggccgggcgggggctgaccccccacctccctcccggacggggcggctggccgggcaggggctgaccccccacttccctcccggacggggcggctggcccggcgggggctgacccccacctccctcccggatggggcggctgctgggtggctgccgggcggaggggctcctcacttctcagatggggcggctgccgggcagaggggctcctcacttctcagacggggcggccgggcagagacgctcctcacctcccagacggggtcacagccgggcagagacgctcctcacatcccagacggggcrgcggggcagaggcgctccccacatctcagacgatgggcggccgggcagagacgctcctcacttcctagacgggatggcagctgggaagaggcactcctcacttcccagactgggcagccgggcagaggcgttcctcacatcccagacgatgggtggccaggcagagatgctcctcacttcccagacggggtggcagccgggcagaggctgcaatctcggcactttgggaggccaaggcaggcggctgggaggtggaggttgtagctagccgagatcacgccactgcactccagcctgggcaacattgagcactgagtgagcgagactccgtctgcaatcccggcatctcaggaggccgaggctggcagatcacttgtgattaggagctggagatcagcccggccaacatggcgaaaccccgtctccaccaaaaaaatacgaaaaccagtcaggcgtggcggcgcgcgcccgcaatggcaggcactcggcaggctgaggcaggagaatcaggcagggaggttgcagtgagcggagatggcagcagtatagtccagcctcggcttggcatcagagggagaccgtggaaagagagagggagaccgtggggagagggggagggggaaggggagggggagggagagggttttttctttaagctatctatttccttgaatatttctcccttcacttcttgtatcatattttggatttccttgcattgggcttcgcctttctctggtccctccctgattagcttaatagctgacctcctgaattctttttcaggtaaatcagggatttcttcttgatttggattcattgctggtaaactagtgtgattttgggggagtgttgaaaagccttgttttgtcatattaccagcgttggttttctcgttccttctcatttgggtaggctctgtcagagggaaggtccagggctgaaagctgctattcaggtctttttgtcccatggggtgttcccttgatgtaataatattctctcccttttcctgtggatgtggcttcctttgagctgaactgtagtgactgttgtctgtcttctgggtctagccacccagtgagtcttcgtggctccaggctggcactgggggctgtctgcacagagtcctgtgatgtgaaccatccattggtctctcagccgtgaataccagcgcctgttctggtgaaggtggcagagggtgcagtggactccgtgggagtccttagctttggtggtttaatgctttatttttgtgctggttggccttctgccaggaggtggtgctttccagagagcattagctgtagtatggagagggaccagtggtgggcggggccctagaactcccaagattgtatgtccttcgtcttctgttaccaggttgagtagggaaggaccatcaggtggcagcagggctaggcatgtctgagctcagactctccttgggcgggtcttgctgcggctgctgtggatgatggggatgagattcccaggtcactggagttgtgtgcctaggaggatttatggctgcctctgctgagtcatgcgggttgtcagggaagaaggggaaagctggcagtcacaggcctcacccagctcccacacaaaccaaagggccagtctcactcccaccacaccccgagtctgtttccaggcagagggcaggtggggcttgaaaacttgcctgaggctttccacttcccagagtatttggggtgtctcccgggtcctgtaggagcagttttctcaggattgctggcctgctcttgcagctgatctggaggtaaaattcacaatgcaagcctccgcatgctgctctgtctggagctgcaatctagtcctgcctcccgtctgccatgatccgaccagcatcagtttcaatagctcctgcctcctttagggactctccttcttctcttcatagttaatagattccttgagttttgtgtgggaggcttgtaccatctcacctagatagaagaattacccaacmcttccactctcttcaacattttttgttttgaaaaaattaaaacttacagaaaagttgaaagaatagcacaatgaaatccatcctgcacctagattttttttttcctcctttggatgagccatttgagagtaagttgcagacatcatggcacttcctctctaaatatcttagcagctatctcctaagaataaaaatgttcacttctatgatcacagtatgattatcacactcaggaaagctactgttgatggaatactgttatttaaaacatagttcatattcaggtttgcacagttgtctcagtattgtcctttatttttcccccaataaaagatccagtcaaagagcacccattgcatttagttgtcatgtctctttagtcctttttctttttgtttcttttcctttcctttcctctctttctctctcttccttctttcctttcttcatgacattgacagttttgaaatgcccaggccagctattttatcttactatctactcctaaagcaaacataattaaggaaatagggagtttgccctatgaaagtttgcagttttttctttctttctcttacgaacctccatgattttatgacttactaagaagcctctaagatgatgctatatgcattcctattggatgtgtgaaattaaaggtagctttttcttcctaaaagtctctgtcctgatagactcttccagagactcacttctcaggacatttgtgaggctggtgaatatatagcaggtgcacttttgacaaaatggcacgtatctctaggaatttgtttctgatattcataggcctcgttcatacctgatcctgtattcatatcaatagtgaatrcttagctgcatttcttacttagagtttggttggttcaagacagttgttttgtttcttagcaatagtcaaatctttcaacttaatactaatcttatatataaagaagaaagtaaatctcattctgattattagagcttttcagtcatgaaattaatgtttcttgttactatcactgattcctcttgaggtttcagtgatgtgaaatagtttgtcattgcatcagatctctccaggtgtagagtctcttgagtaaattttaggacacatcagaaaagacttgacagtttcagtatggggcaaatctagatgaatgagtttgtgttttagctttttaaatattaatatactttttttaaaaaagttataaacaagagaaagacaaatattcagagttgaagtaggagaaatctttcttcactaaagatcttggccatatcctaaagttgtattcaaaaagaacaatatttttgattgtttgtttggttttgtgtttttacatgattcccatatcctttatacatctcttcttcatcaattctcattgaatttcaaaagtagctactagcttagaagacaggaagttacagatgtgtggcaggcaagaatgagatgggagtaaaaattggctcagttaactggtttgtaacttcagcctgttagaagctcgtttcttttagtgcacatgggagctttttttggccatgggaaggcatacaaggttatccaggaaatttttgcttcattatgaaacaaagaaaatgaagtcctgtaagctccctgagacattaagaaatatggtctccagtccactggagataacacaagtaattatcacaaaaggtgttggttatcatttaagggggaaatattatgttgacataatacataatttcagcatctgttgtgccttattttggattataaatccagactaatagatctgtggagctgtttagcccttttcacatcaaattcccatgcctcctggaaaagttaacatatgaaagattcgattgagataggcactttgcatttaataacattttcattctgaaactaatattactaagtgtctgctatgtgtgaagttattttatttaattcatagaacaatcctgccaaataactattcttccctaaacagataaggaaagtgaggcctagagaggtaaggtaatttgtgcaagataacatggctagtgtgaggagtaagattcagattctgttctttctgactaaattttgccctagttcatcaattagtatatgtcttctcagagatcaggttaatcaccagtgagtaatgccagattagtaactgttgagaatgttgtgggaacaaggaatagagaccagttaatctacacacccagtcttgtcttttactggccaccaaccactgtaacctccctatctaacatggctaactggccaagtatgagatttcacaaatgtatgccgtagcagttgggccattggcctccaatcccaaagtgaaatccaagcaaaccaaactgtatcatgggagagctcttttcatccatattaggggtggacctaggactgatgtaggccaaagacttttctgtcctttttctaaaatccctgaggtaaatctcagatcttagtattccagtggtacatggaaaagcaataaagggccgggcatggtgactcaagcctgaaatctcagcactttgggaggctgaggcgggcacaccgcttgagcccaggagttcaagagcagcctgggcaacatagcaagacctcgtctcttcaaaatataaattaaaaaattaaccaggcatggtggctcacacctgtggtcccagctattcgggaggcgaaagtgggagtatcccctgagcctggaagatctaggctgccttgagctgtgatcgggccactgcactccaacctggacgacagagtaagaccttgtctcaaaaagaagaaaagaaaagagagatagccccagtgccaaaagccatgctgacatcaagtgcctcatggtgaccgtggcctcctgagcttgctaggtaggcaaagacaggaagaggatggaatcccagatgagaaaaatgggacttttgacactctggaccaaggaaaatttcctccccttgctcctgaccacccctggggaatggaattagtataagagagctcagaataggagaaaactgggaactgaggatagttgaacctgccagactacacttctcttctttggaatcagagttgcttcctgtgcgatggctatttgattttctttccccttcgggaaagagggatttaaacaaaagaggaaatgtagccttcacattctccttgtccctaggcaatgcctgtgcttaaggataaagaacatatatatttatgtggttctgttaatataaatacttaatacctgcataaaaggagtacctttggatggtaaaattccactttaaaaaattaactgaccagtttcagcaagcttaattattatagcacaagaggttttgtatttgttttgggtgatgataaaagggctcagtggtgagaagtggtgtaggggtgcggaaacaggggagcaatattctcaactgtaatgaaaatttatccgtgtggtaacttttgctttgaatatgaatcagagggagttcatgctttgagacaaatttatggttagcagtaagataaaggcctgttttactgccttctttttacttaataaatcttaattgctttctctccataaattaaagcatttaccatgctatatcctaattatcagatttgtcatgtatagcatcagtttcacagagtaattgccatgtgggctttttggaaaacatcaccttctactctttgttttgatgcctgagaggaattgccagctggattttcagtaaggactctagtcttgccatgtcacctcaattttttaaggatgtgctgatacttattggactaactttgggtgttacagcatcatgggctcaccaattgagggcaaagtaggaaggggagagaaatggtgtgaattgaggactatytagaaagacattcaatgttattcctttgaagtacataacaagatatttctcagtatagatcctagagactggcttttgtgaatagatttatttgtaattagtggaatttcacataaaagtactaaaatcctagagaatattttatggacttaagtaagttatataatcttctttattctgttaatttgcttagcaaaccctttcctggtatttaatgtagatttacagttgagttcaatccagatgagttatcacaaatgttccttataaattagttggatttcataattcttggctccacgcatgtgaaaagggtgtccacaaaatgttcagttttaagttgattggacagactagagagtggcattgtttttttgaatagctgtttatttatcaaaagaaaaaaggacagaaatgaacatagaactgtatgtatttgctgwggtagtcatggcctgtgtgttctcagctctgtgctacaccactttgctgctccactctgaatggcagggaggctgctcctgcaggctacagatcctagagccccagctcggctggcttctggctgggttaggccagcaggaggctctgatagaagactagaggtaggaggaaaggagcaagagggtatttcgcctttgctctgcctccagcaacatctctgatagaggatgggtcttacccatggctccagcttctagtgtgtttccagcatcctctgatggccccaataccctgtgataggagtggcctcctgctgttgagaatctcttaacttgcccaaatgtgccctctttgacgtttcagctcttctctcatgtgtaataaagcctctgtgttaaaagagtggtttccttttcctgattcatacattttgtagaacaatttgcttttatgtcacagcttatagtcttttgaatgttgataaaggaaatgttaaattattcattatctcatttaatcagcttggtattatatttaggtgatggggcaaagaagaataagacaaaatgacctgattgccctcagggaactcagtctgtttggggaaacagtgtgttccccaagtgccaggggagctaaatggaagaaagacctagactgtagtagtggtgggaaagatgtcacaaaacaggtgacatccgaaagtcttgccagatactaagatcttgctcaagcagatgaggaagaagggcattcccagcagaagcagcagtttgtatgaaagcatgtgtcacgtttggctgcaggagcatggtggtcagggggactggaggaagaggaagctagagaggtggtcggggtagaccacaaagagcattgaagcctctgccaggcaattggactttatcctgttaggactgggaagcagtgaaaaggattttaagcagaggaattacatgaacagatttatccttcaaaaaggtcaccttaggagaggtgtggaagagagactagagggctgaaaatggaggcagagaaacctcctggccaggtggtgagtggcagaagtcctggtgggagtgggtggtgtttaaacaaagacctgaattaaaactgaaggcaagaggaggaggggaaaaatcaagaaatgttaagaaagtagaatgtgtagaacttggtgatttgtttgaaagtgttgggagttgttgttaaatgatggtctcagagatcatggaatatttgtctggtttagctaaataaatgttaaaactagaagcctgtttctcaaattggggtcgctgtgtccccttagaggtctcatgcaaactctgagttgtttatgctgccttatgagctagatgtatcttaggtttcaaacaattatgattgcagcactactcaggtcttacaataagccagacaagcaattctttattaaaaatcatttgctactcccaccacccaccaccccaagatctttttcctggccattatgtgccttatctctctctactagtcataaaatttgttggccacccactgtgtatttatctcatctcctacctctacccatcacagctttctcatcttctgattaaatagaagaattagcctcttatttgataaatcattgtatgggtgcctgtgtctaagggtttctgaagtctagcaatagaacatcctctgctcgttgagaaaacatgtagggtcacccatcaccaagcactccacatgccagagactgcactgaaagaacactcaattctttcatgtagttaaaagaacacaatgcttgccctctgagagttcaacatctggaaacaaatctaaagagggagaaactggcaagaagaaacacattagaaatagcatctgccttaaatgatgtacagtaggatttgggttgaggtgctgctctggagttatggcctgctgttagtagtcttgatagctaaaactaacatgcttttttcttgtaagatttcagattgaatatagtggttgagagcctggattctgggatctgacttcctggctctgccacttccatgtgtcaccctgaccaaactgtgtcatctctatgcttcccttcattgtaagatgaggatcataatagtatttaccctaggaatgagaggattcaatggcatgtgtgtgtgatgtgcagcacacctcctgacacagtgtcagtgcacaataaatactcgctgctgacccttcctgaagccaaaaagaagcctctgaaggctcagctgagaaaggtgtgctgygtgagtaccaaaaattactgccttctttccaaacgagagctgctatggctaaccctgagatcctttgtagtcatttaattacagagaaattctggaacatactttcttcaagccaagttagtctttttagtttttaaattacatcttgatcgtatcacacacaatcagttgtcacttcagggcacttccagaaacaagtttgcaggccagcatgtggcaggtaacaccttagaggagactggggcatcactgcctctctgaaatcgtccattgatatcatcccctccctcctcctttgagctcarcacacattaatcaaataccacaatttttcaggttctgtattaggctccagggatacaagggtgaacagacaattcccgtcctcatgaaatgtgcaattgtgtggaactacatgtgaacaaattcaatccactgtgatggaagccccaatgggagtgtgtagaaggtcagaagaggtacacagaaaggacaacaaggaaggcttcacagaagtggtgacgtcccactaggattttgaagggaataagaatggggagaatcagaagatcagcacggtttgcacagaggaactacagcagaggtgttgtggggggacatggtggtagatgaaattgaagatgtaggcaggagtttgatcatgtaagagcttggcctttgtcgtgggaacatcaggggccattgagggacttcaggtaacagaatgccacagatccacaattttagcaggatcaccctagtatgaaagacaaacttgaaaagggtttgcagatgctggcaggttcatgtcaccactgcggattcattgagggcagagacagagtcctatttatctatgtacccctaaagtttagtgctttatagacatttaagaattttttttttcagagtgaagacagcccaagttgaattttcccattctgtatcctatcctcagaacatgctgacctggacttccatctgtcacaagcagcttgactaagatcctaggaaattcctttttttcttggcattcttctaactgacactctctgtttactgggccctctgtgcatctgtaacgtgtgatgaytgatgcttataattctgaccttgaagtacttcatggcttctaaatcatcaaaaaaagattaaagcatattctcagtatcactgtaatgtttgtgtgttttactgccttcttctctggaaagtggtggtttatgaagtgcccgtgcgcttgtgtgcacacggacacagtgagagtctgtgatggtcctcaactcttctcccacagggaggctatggtgcgtgcttgaaaataaacaaacaaaataacctgggttctcttcatgcctagcaggaggaagcagcttggtcccaggggcaaagaagcttgaaatgagagcgaaagcagtggttaggaaagcagagggaatgatgaggcagaactggtgcagaccaggagtcaggcagtttacgagccagccctggctgactgcattctgaccccaggaagagcaaagcccagggtcgggactgcagcttcatgttctgtgtgcctggacccgaatcatcaggcttggatttggcgggattctccaccagctatgtttgtatctcagtaacaaccgctcagtaaaatgccagacattaggcaagtgaaaacatcaataattagagcctcctgttccccacacatcttttcttgaaaacctttattgctgcagagctgacattattaggcacagaatgaagaactccaaatagaaactgtgaaatggctccatcttataacctgagtcctgaaaaataagggtgtgatgttgtcactaggcgggagatttgtttaggttttctttttttcttttctttttccttttttttgagatggagtctcgctctgtcgcccaggctggagtgcagtggcgagatctcggctcactgcaacctccacctcccgggttcaagtgattctcctgcctcagcctcccaagtaactgggactacaggtgcctgccatcacacctagctaattttttgtatttttagtagagacggggtttcactgtgttagccaggatggtctcgatctcctgacctcgtgatatacccgccttggcttcccaaagtgctgggattacaggcatgagccaccacgcctggcccttgtttgggttttctttggggaccgtatattgcagtaaatagaaatgccccttccattttgttgtagaaatttgtttttaaaatctgtgtttggtctacactcgtcatcccagcctaaagagccagtccctgaaccacagaagttctgtttgccgcctctcagccacggcatgtgtgggctttacaggcagctttaccacttgccagttctgtgaatttgggcaaatgttttagactctttgggtcttagttttgtttttttaatctgaaatattggaataatgcagattccttattttacagcgttgctgtgaggctgaaataaaatggtggatgtggaaatgctcaactagaaggccctatctatatcaataatagtatattaaatatactaaagaacatcataaatatcctaacaaaaatagaaatatatttcatctgcaaacatgacatcctccaaaattgtcccaaagtagagtagggaaatgaactatttattgaatctctaccttaggggaggtgttccagctatcactttatctgttctgcaaagtagatcttaaatcccacttttagacacaaggaaactgagactcctagtcacagcagaagtgggatttgaacctgactcgagaacttaatgctccttctccttggctacattatctcgttgtctagttccagacccccagtgttcttaaaagctttgacattctttggtgctgggaagtgtgccagccatttcttggtcattcactcctgtaagtgggacagggtggcacccagagggaactggagcaccaggtgcccccagagagaccagcagcacggagtcgtccagtgtgtgggacaggccctccgttggcgttccacttttagggagttggcctggcatggacagaaagccaggcaacagctgtgccacatttcctagcccttgagaaaatggctacggccctgtcgttttcagaagttcattctttttctgtcaaagtgaagccacccttcctcaggactcctctcagcaatcagtgcctcttgtgtattctgaccggccccttattctgtttgtagagggagtgagattagatttattctatgtagtaaccactccgctaagcttttctgcgactcttcctgttagctttgatgccgggcactgggggaaagggttcccgatgtggcagttccttaagtgcccggtgggacccactgctgcatacattttcttctttatatccttccctgattcccaggcaaacagactcggcttgtgaactggagctgcccacccagagaaccagagataatgcctgttgaagggccaagttgcatattcagcgaggatgtcagtgtgtgggagaagcatttgttcagcctgcgsttctgagaggaactgtgtgttgtgttcccataggttctcaacaggaggtgtgtaraagcggcggtgatgacaggcctggctctgaactgccacataaacaagaagtccttgtttgacaggaagcactacttctatgcagacctccctgtaagtacactttgtgatccaccccactgcaagttctcagagctgggccagccctgctgtggggggtcggagcaagggaaaggggctgtgcctctcatgttttcagccagcactgtgtccatcccagcaggaagttcggcccagccctgatgcaggcaggtgcccctgatggttactagatcggatgcarttgtcctgattgctgacttcttgcttacctcatgcttctggtggctcgctcataattgcacagggagtagaagccagtgttygcaggctcagcctggccgtggtatttggtgctaattgcctgttagtacaaaagctaaggctctggctgatgcaacagtaaatgcatactgtagttctgtcagcagagcgagagcgaatcgcttttaagttgaagttcccaataatagggctgtctcctttggagacatttctgtcatctcacaaggagcaagtaagtggacaatagtaagcggaaacatgaaccagaaatctggaccaagaacagtaaactgttggtccagttacttggctgagcagtaaactccatattgacccgcttttttctgaaaattaaaaggtttttttctttaagccacaccatgtgagtgagagccaatttttcatactattgaacaggaacaaaactgaaatgttgaatgggtttcccaaaataatgttttgtttggtctgattcagaaaaacaacagtgatgatgttgcttcacctctttctccttgaactgaagattggggcgagctgttttttagtgggtgagggcacgagtagaattaaataaaaaatacaagtaagacctgcgttctccagtggctgctgcttttcccctctggcctccagcctctcagcaagtctactgtttggtagggcggaaagaattaaaccgcctttctttatcttttaagagtgacagacagtttggttgaggtgggagatttagtaataatatgactaaaatgagatgttttggtcatctgtggctttctggtctttctggcccagatagttcaaataatccagagtttcatgggacatactcatataataaagcatttgttgttttttctgaaattcagatttaactgggtgtcctatattttatccaacaaccctacccagagcttagttttacaaattgagacttcccgtctcagcatagaaaacgggttagccttttgcaggattctcaaagtgtggtccccagggcactgacatcatcatctcctgggaactggtaagaaatataaatcttcaggccccaccctygacctactgaatcggaaacctttgaggtcgggccaagcagtctgtcttttgacaagcacagtagtatttctgatgcagttaaagttcttaaactgggggcctgccaagtggtgaaagacacggattttggagcctgaccatctgaattcagacattgacattgatgctcactagctctgtatgtggctgtgggcaaggtcttaatccctccacgccttgttcctccttcctagggttgttgtggaattaactgagggaacacagtgagagcagcacctgggacctaggaagtgccacagatgcctttgcttttattctctgttcttctccaattctcctcattgacctgctgtctctttagtgcgtattggtgcctctgtgcgtttgcaagtaattcttcctttccacttagaagcaggtgagggatccttgcaggatccatcagtgctttagtaccatgtgccttccattaatggagggggagtgtcacagcattttctgactggaggagctagggaggttgggtcagggagggcagctgccatgattgattcctttaaaaagcagaaacaaaacaagcttaaacacacactagcaactgctgttggccgtgtggagagtagatggcaaaatgcttagccagcattccaaataaggagggtctgccaggagcctggtaatgagatgcagagtttaggctaatgagctggatggaaacaataaattcttttcttaggggtccctgacaatgacattattgttattccccaatacagcactttaatgagggcaatgggatgaattcgtgttgtttattgcatcgttatcaggggtggaggatttggggagggtgaaggggtgatggcaggggcagaagagaccaggctcaatgatggctgcaatgcagcaactaatttttttctccttttcctttttttcttgttgtttttgctttaagtaggcctgtcgttgtgtgacattgtaaaagggatagtaaactggatcccagcttttatgtgtggaccagtgactatgtttaccctatgtttgtgtgcaggcaggctaccaaattacccagcagaggctcccaattgctgtgaatgggagcttgatatatggcgtctgtgcagggaagaagcagagtcaggtgatccccaagacggtgaggatcaagcagatccagttggagcaagacagtggcaaaagcctccacgacaacctgaggtctcagacgctcattgatttgaacagggcaggtaggcttggagtgttttcattatttctccttcctacttcagttcttggatagcagggccctcttttcaccgctagagttttcttgaacaaattgagaaagcagtcacaggagcctgatagatggagactaaaatatcagcattgggattggcatagctgactagcgaacatggcttgaactgtaattattaggcttgctaataactcaccctgaagttagacaaacctatccacctagtcacagacccagcagctggatattttaagcagtcattaaaagaagtgaaacatttaaaaatcaaaacgtggagcctaggtgcctacacrtgtaatgctagtgactcaggaggctgtgggaggatcmctgtaygcagagtttgagatcaggctgggcaacatagcgagacctacttgccaaaaaattaacacctaggtgtggtgccatacacctgtatccccagctattcaggaggctgaggtgggaggatcacttgagctcaaaagttcagggctgcagtgagctatgatcatgccactgcattccagcctgggcagcagagcaagatgacgcctctttaaaaaaaaaaaaaaaaaaaaggtgggagggaagagaaatgattgagaggctagaaccactctgagagtccttcagtaaggcagggttttcctgaaacttaggcctaatttttctgttggtgaaattggagagctgcagtgaggctgactctgcccctctttggtaggagtgggccttctggaggtggtcctggagcccgacatgtcctgtggagaagaggcrgcaacagctgtcagggagctgcagctgatccttcaagccctggggaccagccaggcgaacatggcaggtagaagccacagaagcagtattcttctttccctctcccttcctgccttctagaacctctctgactttagttttattttctgtctattatattgaggttgtttgcagccattttttccccagccttttgcaaccctgtttttttgttgttgttgtttgtttgtttgtttgtttagaattttccttggattctttgatgagcccccaaccaaatataaatatacgaccaacaacattgcagagacaccaaacccttaatgaaataatggctttgaacagttcagtctttctcaggaagaagacactgtttatcaagaacagttcttagttagtgagtaccgtatagatagcacttcataattagttgcctcttttcctttgggtctgtttctttccttttgtagatttttcatccatatacagcggaagccaaattatattgactataagccaagattatgaaaactttaccctgagataaaatcttaattaagttcagtggaaatacagtgggaaactaaaacaaataaaagaaacacctgcacccttgggaccagaccacacattataagcatttgtaaattacatataaagatcataggttttggtcacactcaatttcctcatggctctaggtatcctttgccctggtctggtactgctttgctctcccataagtccgtaaagggtagcctctgctatcattttctcctgttctctgttcctagggactttttgaaaacttcttccaccctcagagcacaccctgatggagaggagacaaaatataggttctgaatctacaattgtacttttccatagcactgtacaatggtcacagcaggtgcccaggaaatcccgttgatgatgatgttcatctccatgctggttgataatactgtttaccaagcttagcatgtcacataatgtatttgcatgttacagggggacttctggatttgtaatgccacatttgtcacataggatgtgtaataagcaacaaattataacatcagagccctggtacatgttgaatctgaggacagaacttgcttatttgctattttacttaaagactggaaaaacacagccacatgagtttgagtggcataaaggttagctgcctacaagtttctttacagagacaacactctcttttagagtaagagaattctcaattttagatttatcactcatgccagtttttttttaatccacagaacataaatgaaatgtgggcaagttggatggttatccatttatgctccaagtgttgattgctttaagaaagtttttattatcccattcttcttcaaaataactgtgattcctaccaaccctatgggatcataaataggycacctgttaactgagaaatagtcccatctgggtccttgccaagagataaacgatagtggcaagaactcatcagtcagtgacagctgagagtgttcattaaatctcacttgttgtgacactttttgtttcttttaaatacaaatccaacagcttttaacacagcagccgagtagctttggttgttctaaagttccgtgggagctgaggtctgcctggagtctgcagggagccagctcctttggtgctgtgagcattttatcagccccctctcctttgctcatccttctgtccctcctcccacccctttaggaccactgtgttggccttggagcctgcagcttaggagctgagggccaccctgaagaggtgacactgaagactagtggacacccagggtgctgtggaatgaagcctaattgcttctgggctgtggttctgtgagttcctgatagttttgctgatgagcatagaccagcttagcccaggttccaagtcatttcattctcagtggacagccttttgcccctgttgtggagatgcccaaagtattaatagtttggtaagttgaatgtgtacagaagtagacatgctaagtgtttcaacgataataatatctatcagttggaacatttaatatatgctcctcagttcactaggcattttaaaattaatttgacatctcatttacattttatgacattgctgagaagtaggtggtagtgtttgcctgttgcaggtgaggaaactgaggcttagagaggtgggagttatttgcctaaggcttacaagaagtgacagagctgggacttgagcccaggtgtgtctgggtccaagagccctttctgtaagcacagcttcgtaccacttccctagtggcagccatggcagtgtcatgaccatcacagatgctgacttaagagaggcaggatagcaaggtggggtgccaagggctgccaggtcctggatctggcttggaatcctgtcctgcaacttctagctgtaggttcccaggctttgatttatctgagcctcactttccacacttaaaaaacatgttcccaaataattttgtacagaaggggaaaagaagaaaccaaagaggaaaggaaatcatcaaggccatctgatagagctgatggagttgcagcagctggctgagaggaatgactttgtgggagaaaacatagaattccagtttgggcaggttaagtttgaaaggccttgggaatagctcagtggctttgtcaccaaaaccaagagttcccaaccattttagctccggggaccggtttcgtggaagacaatttttctgtggacttggggggccgaaggcggggtggtttcaggatgattcaagtgcattacattgatcgtctgctttatttctattattacattgtaatatatagtgaaataattatacaactcactgtaatgtagaatcactgggagccctcagctggttttcctgcaactagatggtcccatctgggggtgatgggagacagtgacagattattagatggtagattcttataaggagcacaaagcctagattcctctcatgcacagttcacaatagggttcgtgctcctatgagaatctaatgccatggctgatctgacaggaggcggagctcagatggtaatgcaagggataaggagcagctgtaaatacagatgaagcttgtctctcttgcccatcactcacctcctgctgtgccatctggttcctaacaggccacagaccagtacctgtccatggcccccgggttggggacttctgactaaagctatattacaatgaatgtactaatgtcaagaaatgtactaatgaatgtactaatgtctagaaaacttaggacagggcctcgaaaacagcctgtgctggatacatgttcggtgctcttattaacagtaataagtagtaatacttttatggaattaccactcatctagatgagtgagctttgtaaaatacgttcagtaaaatttgttcgctttttttttggtcaaaccttgttattttcagtgatcagaacgagatagcttaacaaaccttacccactgcatctttgggcccctgctgtttgcagaaacagttttccatcttgatgttatatttctgttgtgtgartgtgttttagagaaaaatatgaaactgcactttatcactgtgctcagtggtatagttttttttagttttgctgttataaatctctacttctagaagatagaaattgagcctgatgccattctcatgatgtgtgaatgaaggctgtccctcagtggtgcagaatgcattgaagtaaacctaactagtaaagcttttgtgcacttgaggcaatttaacttaatttgtttaaaaggtattttgtcttcactagatagcatgtcttttgttaatgtttgatactgcatttgaatccaggctggtgaactctctttcaacactgcaggatactaaatgattcctctcaggtatttatggagtgtagtcttctctgggagagaccgaaactcatgcttttattcctcttccaaattagaattctaaattgtgaaagatgctttcatttttaaaagcaggcgaggtccaattcatggttccctgagttcaaaaaaagttgtctcccaagtattgcaatttggttcgatggagctcagcacactttggaagttttcctttgagcttaatgggcctttcagaggattccaactgcagattagtcctattcagacggaactgtagaacttaccgggaacctagtgtgagacagaaaccagtctgcttactcattgctcaggaaaatgccagcgttctggcattcgtcgctcaataagatttcatttattgaacagtcaccaagtgccagacccaactctaggtcccacaaaaggcgttgttcctgccacatggatcttatgttcaggagggtgacaaagacattaacaaataaactaattacagcaacaaatgcctcaaggaaataaatggggtgccatgctacagagtaacattggaaagtgacaatgttgttttttaaaggccctcagaggaggtgacatgtatttaaaacctgaagaatgattcaaggcccaggcagcatagagccaggagacgagcattccagaaaacagctaaggccaaggccctgaggtgagaaagagctaggaatgggccacgaggtaagcgaggtagcacaaggccactgtgccagaagcagaaggagcagtggcatcaggtgacactgtaaaggcaggcaaggggtagatcagagagaatggcaagaagtttagctctcaacccaggtgcagtggtaatcactgaaaggcttttaagcaagggaaagacatagtctgatgaatgttttagaaaaccgctctggctgctctgtgggaagtggatttccgatgggtaagagtagaagccaggagaccagttaagaagcttttgcaatagttcagatggaagatgatgctgttttggacagcactggtggcagtgaagatgaaggagagacaagagagacatacaagatggtttttagaaataggctggtgtggaaggtaagagacagggaggaagcacaaatgcctttagggaagttggaggagctagatggtggtgctgtttaccgaaattggaagatgagatcgagaatgtctttgtgcaggggcaaatcaggatttccttttggaaattgagatgcctgtgaaacctccaagtggaggtgtcaaatagataccagagctgtaagtgtggagctcagagaggtctgggctggagagagaaatgtaggcatcctcagcatgaggtggtatttaaaactgtatccgtccacccagagagtctagataaggaaggggatcctgggtttggatgggaaggaagccatcagcaaatgaaatggaaacaaagcatccagaggacgaaaactgggagcaaaaggcagcagaagctgagctaggaagataattcacgaaggaaggattggttggcttgtcaaatgttgctgaggcgtccagtaggtgaagacaagcgtgtcctgtgtccgctggatatggcagccaggagactgttggtgactctgacaagggcatttttagagagatggggagagaagctaggctgacgtgggttaaggaataaatgggaagtgaaayagcggagacagtgtatgcaacaaacaaacaaaacttgtttaagaggctttgctgaaaaggaaaccagagaaacgatagatgagtgactgatagagtgagaactgggttcaagggaataggttttggggttcttgtttgttcatttaataagaaatactattgcayatgtatacgtcagatggaatgctgagaaagagtaatgactggtatgggagagaagggataactgagagtgatgcccttgagaaggcaagtgggagttaaaatctggctcagtcctcaggggcctttcattctggtcttaaagatggaggccagtgcacagaagactatggtcatgtactgaattctgtagtatagattataagtattctgatagtttaggggacccaccagtgcaggccagcttgctgaggagggcttctaggaggaggcggtaacactcaagtgagtccttgagggatgaggagagggacagtagctctgataaagagagcgtgctggtggagcagacagggttgtgtatacagaaggctgccctgattggaggggagctttctcccggaatgagcagtgggaacatacaggttatgtcgactgaatccagatgacagctgtggagcaccaagcagaggagcccagataatccggtaggagctgtctgtgctgttgagtaaacagcaggaatgatgaacccagactatatatagcaggatgaaagttacagccacattgccagtccctggacaaggagggaactgtgttgagtcaggatgtgctcttatcacctaagcctaaagttcggagacctcgggcgaggcaccttgggcaagggtggtagccatggaaatggaaaggccgtgacagacattagtgatatttgacagcttccaaactggtaggggctagttgccagtttggatataaggggcaaagaaaacagagaagtagaagatgacctcagggttcctagaccgagagtctcacggtgtcaggaatagttgggacttcctgagatgcagatacacacaacttgtcaaaaaagggattaaaaatcaggggttacagaattcttgtaaaagtgttgagaagtcagtgctggagagagtaatgtctgagctaagagacatcttttccctgtcagcacgggtggcaattgggcgagcccttccctttctctgagggtgagtggtgaggtgtcagccacgggccgccggcgacctccagcttggtataggccccacagcccagcactgggagaatgacagagaaccagttccaagggtctccttttcttgacatggaattcattttgactactttattattttaatatgcttttgctttggaatcttgggaaatgaatttattcagcccatcaagacactcaggtttggcagattacttttaatttaaaaacgtaactaggaaaataaaatccagcattttgtcttctcactctgttctcttttaaatgttgtaaatgaaacgaggaacagagaatctgagagctttactttgtagggtgccaaatgtgattctttcttacctacatctatttgtcttgggatttttctctctctctcttcctcaagagccttttagtcctccccacacattgcctgcttctttagggcttgttgctcctaatctgaggggcctccagggtcaaagaaggtcctcccagcatggggtcagcacctctctgagtcccaccacagactcctgacttcgtaacagtgctgtctgtctgctgtagcaaatcgttagagcagtcaggaaggattcggagtcatgtttgtggaaggaagagattattacagtacctggaggaaggaggaggggggaaagcccagatttcagttcttgcccttgagctgcaaattctcaaggactctcctctaaatctcctggaatcactgttagaaatccacattccaatggagagcagtgtagggttatcagatatatgaggcctttcctccaactcagctctgacactttgaaaaaaaacttcagtataaaactgcagagtcaatctccattttaatagttttgtttttcttgtttagcacaaaaaaattagatctctccagctggcgaatctaaaacttctcttccatatgtgcataagcacacacatctgtatatgttcacatgtacaggcacacactgtagatgcctcaggactgtaacccctctcgagtggccagaagtaccagccacgacctacttcagaaccaaccgtgccttctctgaagttaggctgctataactaaacagcaggtagagttagatgctgcttcctttgacactccctgcctttaaaagactatgtcacctcaaagaatttctaaggagttgttttcttctctccttccagagggccagttgagagtggatgccaatatatccgtgcatcaccctggggagcctttgggcgttcgaacggaagtgaagaatctcaacagcatcaggttcctggccaaagccataggtgaatgccagctgccgctcctagtgtccttcttcctattgtttctctcttgctgggtaacaaacaacccagaaacttagtggcttacacaagaactactttcgttttcactggtccgttctgttggtcctgtgtcggctcactcatgtggctgtgggaaaccggcaggccagctgaagcagagggtccatggtagtcgctctcataccttggggccttgatgctgatgtctgctgggcttctccatccatgtgatctttcttcatgcacttgcctagccttggctttcttatgaggcagtgggagcatttcgggaggatgaaggcagaagtgagtcctaagctgtagacctcacacagtgtcacttccaatgtgttctattcaaagtagattgaggccaggcacagtgcctcatgcctataatcccagcactttgggaagccaaggtgggtggattgcttgaggccasgagttcaagaccacctgggcaacatagcaagaccccatctctataaaaaattaaaaatttagccaggcatggtggtgagcacctgtagtcccagctactcaagaggctgaggtgggaggatcacttgagtccaggagtttgaggttgtagtgagctgtgatcacgccactgcactctagcctgggcgacagagcaagactctgtctctaagaaaaaaaaagaaaattacattgaattcaaagcagacttgaggggaaattagactccacctctttatcagaggatccacaaaagatcatggctgtgttttaccatttaccaccttctttctgaccagcttgagatttactaggtcatggttgttcattttagattgaccatggcttgacctaaatggtcattatgttttcctgctttttatattctttttaactgctagattatgtgcccatgcagtgaagtagtagtctttctggagcacacactgtgggtatttctttgatgataaatgtataataactaaaatagtttagcaagataaatatctgagcagtcccgtagatataggtaactgtgaattcaaggggaggacctcagaggactaaaaagattttttaaaaccgaagctatctagagaggaagagggagggatggagtttgaagtgcaccccttcaagggtgcacagagaccaagacaactgaatctgttgccaaagttttgctgtagccaaaatgtttaatagagccctggtcttgtcaagaaaagtattagaaacagtacagaaaagatgattctagtcttgtattagaccttattgtcctgaacctgaagtgaatcaaccactcaatgaagacagtcttcaggaaaaaggcattaaagtggtcaaacggatagcttatgggagcagagagggaagggataggctcctatatgaaggcagactaaagatggtgaactgttctgcatccggaaagggacatagcccatgttcccaaagccatgaaaggtttgagtcagggaaaacccttataagccaagttggtgaggaggaagcctggaacaaatggaggaagttccacctccccctgtaggtagtgggctgggacccgttattttaagaggtggtgatggtaaccttaaaaaagcagcccaattttaggtagagtcatccatgagttctgaaggagacccctaaccttctcctgtcctatgaagaactctttggaggaccagtctgagggagaaatctccctgtggtctgactcagagtggaagagccaaagctttactatgggttcaattctccaagcctgtgatttttcaycacctttttctccctatgtcaggccatttagccatcatctcgtgtcaaccaaagagatcactggagttggggagagatggggagcaaaaactgacacgttttgctgttgctgcctcttagcaactcagataaaagggtttaggtttgggcaagggaaggtagtacatggtgggagggagagttaaggtggaggctcaagatattttcataaagcagtttagcaggctgggcttagtggctcatgcctgtaatcccagcactttgggaggccaaggcaggaggattgtttgagaccaagagattgagactaggctggaaaacatagtgagacccccatctctcaaaaaaagaaaaaaaaagcagcaacagcttagcaattgtggttgtgttttgattcccacagcctccctcatttgatgctgaggcatgggtccttggatcttaatcatttggggtcgtgggtccctctgaaaagataatgtaaatgctggaccctctctccaaaacctgcacatatgcacacaacccacactttgtgtataattttggggataccagagcctttgaagcccatcccagactcccagggtaagggccctgggtaggcagcaatctcagaccgagatattgggcccagccccacttctgccaagtcatgtcatctgcatggggttgcttaatctctctgaacctgaattgtctcaacacggagtgagcctgccttcctaaggccctttccaacaccaatattctacgatggcagtgagaaggaaatatagtgtgtaagggaaggattattataaacaatcttcttgattttttttttttttaacttagagattgagaaaggttgtttctaattattgcttgactggatgaaaggtataatcaaaatatgatgctaaattagtgtgtttttcctagactatgaaattcagaggcaaatcaatgaacttgagaatggaggtgaaattctgaacgaaacacgctcatttcatcacaagctggggtgagttcgcattgctgagcgtcctgaccacagccgggggtggtgcgagagggctgggctcagccactgaccagccatgtgaccttgaaggaggcacgtagcgtctccacttttaggtttcctcattagtacaattagaaaagtactgtacccttcatgcctgtaatcccagcactttgggaggcaatgggcagatcacgaggtcgggagatcgagaccatcctggctaacatggtgaaatcctgtctctactaaaaaaatacaaaaaattagccgggcatggtgatgggtgcctgtagtcccagctatttgggaggctgaggcaggagaatggcatgaacccgggaggcggcgcttgcagtgagctgagatgttgccaccgcactccagcctgggcgacagagcgagactcctctcaaaaacaaaaaagaaggccaggcgccgtggctcacgcctgtaatcccagcactttgggaggccgaggcgggcggatcacgaggtcaggagatcgagaccatcctggctaacatggtgaaaccccgtctctactaaaaatacaaaaaattagccaggtgtggtggcgggcgcctgtagtgccagctactcgggaggctgaggcaggagaatggcgtaaacccaggaggcggagcttgcagtgagccgagatagtgccactgcactccagcctgggcgacagagcaagactccgtctcaaagaaaaaaaaaaaagaaaagtactgtaccctatagggatataatataccctagggctgccaggaggcttgaagtgacccagactgtgcccaagggcttcgttttaggccctttccttctctgcttccagcttacctgccttgtggcaagaatttttacttccttaatctatcagayctttcccagctgaagctagaggcggaacagagtgaagacctggttgtagagatgccttatttttgtttagataacttgggccttaattttctcactcagaattttgagcattgtatacttaaagcagaatactgaaaaaagctcaaaagccgagtttgagctggctgaaagatggctacattgaagtcatttcctttaaaaaaaaaaaaaaaagatcattctgtacatttcgctttctttatgattgttttttgaatgtattcatttaaggtttccccatggaagtccacagagtttgattttgcctgtgccccttattggtaggggagcccttccccacatataggctggccagtgctgctttcaatgtttaatgttttcttatttaactattgcaggtgcaccatgtcaatgagagacaaagaaggaaaacaggactacaggtggttactccttatggcaaaataccgctayatatcgggggctggggcgtatttcaagttcatttaaagttcaacataatgatcctgaacaatttttagaaaccactttttgtcattgttgtaacatgatgggacatctagacttcctctttgatatgcataccgagagaagtactagtttcttgatttggtagcctcagatctggtgccttgtttgactgattcagcttttggaagaacttgttcatccactgctgtgtcaaagttgtcatagttgagctaggaggatggctgtagaggttggggcctaggctgttcttattctaatgttcagtaactgattcagtaatacgctgaatgaagctccttgagaagaaatgagaaaagagatgttgatagcgtatgttgatggtagttcccttgaacctcatatgatgctatttcatgataaattaagttgaactacttaatatgagacccacaaataaagcaaatgctaagaacaggcataagataattgaaacttttatttttttctcattgagtttagcaggttgaagttttaagcaacaaagttgtgagatcggccacctttcctttgtgaagggcagaaagatgcaaatgtagctattatcaatgaggatcaaaatttgcatgtttatgtgggaaagaagaaactcataaacgcttagcatgaacctcaccccaagaactcccattgtctgtctgctagagtcaaaattattttaattaaccgtgaacttcccgggtgagtctgttctcccaggggcccactttattcctgagtgttgctccctcccctgttggtgcgccttcccctgagtgtggagtccggctttccatccgcccgtggcttcagcatgatgcctcaaatgatagtgagctgcaggaagcttcccctgggtttcctcttgccctcagaagccagactaactcacagaagagatctggcagtgagccgatgggtagcgtgtgcttcgaatccattccctccaaaccaccacttcttctgaataccctgctttttctacataagccctttgacaaaaatgggcagagagtaaccattagtgctggacgagaacagagggagggacatcttgtttcataagattacatgcaatggtgcagctttgacacttaaaaaaattaattcccttcattttttagagcagttttagctttacaataaaattgaatggaacgtccagagttctcacatactcccgctccccactctccccccagagtctcctgttaatgtgccacagtaatgcaagatgctcatttgttacaatgatgaaaccaatcacacttccttattggctagagtccatggtttacactagggttccttgtttgtgtggtacattgcgtgggttttgacatatgcacaatgacatgcatccaccatcgtgtcacactgagaagttccactgcatgccctgtgctccacctcttcatccctccctccctcttctccagcygtcacattttgtttaggcaaaatctattcatttcttctatttctcaagggtaaatttttttcctttcattttttatttatgtaaatgctgctaaaaatagtagaaatgttgaaatggggggaaagtcatctttccttctaataagcaaattgctctcatttggtcctgttttttccagcctgtgtctttatgaagacatagtcctgcatrcatatggatgtttctgtcaacagtggattacgtatgctacaggagtcccataagattgtcatatggcatttttaccgtccctttcttgttcagacatgcttagatacaccaatgccattgtgttacagttgcctgcaggatttgggacactcagtagccttggagcagtaggctactccacatggcctatctgtagtaggctgtaccatccaggctcatgtgagtgcactctgtgatggtcccatgacgaaatcacctaacgacacatctctacgaacatatcgccgttgtgaagcaacacacaactgtgggcacaattcctgatgaacagtggaatgaatgatccacagttacaaatcccagtgtgacttcaagcctgtgttgtgcttctttcactcatcttatttataagcatggagaggggtgggtttggaggttttgacacttatgcaatggcttccctgggaaacagaattgacgtaataggacatttgaaaatatttgcaagtaacatggcatctaaacacagaaacattcatattactgggggaggttttgttttctcattaatccaagtactccagattcaggtcccgtctcctctgtctgcccaggttcatgccagaacccaacctgcctcccctggtgctctacgaygccacatctctgcccgcaggtgcagacccacagcaagtgatcaatattgaccagattcgggagacactcccggagctccccagtgtgacccgagagaagcttgtccaacagtatgggatgctgctggaacacagcttcactttgctggtaggtatcgatcggatgccaagaggatcccggctcagcagatggggcagtgcccttcagaggccccgccacacacaggctgccatgggctctgagtggggtgggcgtgtttcttgggttgtactatagatgctactgagaagaataagatgtagtaacctttgctcactaccctttatggtaaatgctcttcatacaaccagaagatgaaacgcaatcttgtgttagtcatttcttctgtgtagaaatgaacgcctgaccacagcagctgtggagacttcttgaagactgtccaaatgttatggatgagtttttcccatgtgtctgaaggacaaaagaaaatcaatgtatagggtttctggatgtctagcggtatcgagccatgacagggctggcaggatgttgcgttctcaaaagccagccagttgttttgccaatttcagaagaaaacatttattccacatgaaacactaaaaactctgactaaaagtatcagtcctttgaggcttgaggctgcgtctgacggggccggtagagaacctgacactgtcaagatctgcttagggattttccatccttttcaaagctgcctggggctttgtggttttctttgtcatggcagcattaaagtgatgcggcatcagtgagggtagtattttgtcaccgttgtcgtcgtctgttaggaaggaagtgggaagttttgttgctgcatcttccagggaatcagtatatgccacacctatcttttggggcagcaggatctgcggaaactggatttttgctttttggatggccagtcataactacattgggatgctggagtatatatatttatatgtctatttatacacttccaataacaacatcctagcatttacagtacaacgtaggcagtcagatgcatgttgaatgagtgattctctcttcatcatccataaatcagctacttggagaagcagagttggtcactgcctcctgtgggctgctgtttgatcttcttcttacctctctggcaattatatcactgtcttttaagtacttattagtgtatgttgttcagcatcttgaaggcaaggactgcttcatcctctgtgctactcagcacagatgagcacaacatcagcagtgcttaatgccacactttgactatgactgagtcagtcagcattccgtacagagcacctcttaacccaaagcctcttacaattcatgtatttttcctaggttgacgtaacaaaactacrttttagtcttatacatcttccccaccatcttgaccacttgagtttccaacctacttgaaataaacactgaattctagccctaccttktattactatttgtgaaattacataggagatgggaggaagggaccaaggctactcagcctcgaagatttaagttacctccctccactcagcaggagcccaagccaaccctttgaggtagtgtatgatgaaccaagaaatggccaaggtttccttgctcaaaatgtgatttcatagagaaattgactatatataacattaatttgtgtgtgtgtgtgtgtgtattagctgtctccataagagagtgaaagaaactttcagaatctcaagaatacagctgtttctgttcaaggcactgtatgagaatctgtgcccccttcagagggcatttccataggattgtcactctcggccgttcatgagcggtgatggggacagtgcctgccttacctcactgagcataagctccatgagggcagggacatttttgtatttgtgtttgtgtccttgtctttattcatgggtcctgcatggtgcccaaacctagtaggccttaaataggtgtttgctaggggctggcagatgagtgagtctatattttaatagtttaaaggcctgtatagggaaacctaccttcagttatttaattcagcacttttttttttttttttttgagacagggtctcaactctcgcccaggctggagtgcagtggcacgatctcagctcactgcaacctctgcctcccagattcaagacatcctcccacctcagcctcccgagtagctgggattccaggcatgcgccaccactcctggctaattttttgtatttttagtagagacagggttttgccatgttggccaggctggttgaactcctggcctcaagtgatccgcctgcctctgcctcccaaagtgctgggattacaggtgtgagccaccacacccggcctggttcagcacttttattagcatcttctgtatagcacgtactgagacagaaacaaaagatttttttaaagattttttttgccttccaagaatttatacatacacatgcacacacacacacaccccactacaataaccagcccacaggacagattacactagatagatggataatgtaggatcagggcccacaagaggtagtggttaacttgattggaaaaaaaaaaagaagggtgaattttttggccatttttgaaaggactttttttgataccttaaaaacgtccttatttttatgrcttgcagataatgtattgggtgattagtatttttcctttaaagggctagtacttgaaatttccaagatgagtgagattagaatgagataggaatggaaagagaatgattcagacaaattgttttcctgaaattaggcagcctgagccctttatgactttgtaatcattggaagcggcgttactcataacatacccgaaaatgatatgttcgtgttttttcctgccttcatcagaaacacaacagattgctgagaagggcagatgcacaaatctaatgaaccatctttcaatttaaagagcgcccaggagtattcattaaataaatagcagtggtggaggtgtgctttgcagagctgcaactctgtgctctctgtctttggattgcttattaaattaagcattatgcacatgcccacccccatgcacacctcacccacaaatgacgaaaaacttcagaatttaactctagtctttaatttatcttgtcattttatcgtgcagtgagcaccaaattattcttaatatttacagaactctaatgttatgctttagcgtctaccacacacaatacctgacacggtaggtactccatgactgggtggacagacgggtgagtgaatgggatgttatcacagcacacaggaagatcctgggagaagcagtgttcctgataaaagcatccctgtttccaaaggtcagatacataaaccatgctttgacaacccagagaatcatggggtatcttgccccacctaaaacttcaacctatttagctaaccttgcttctctagcttatgtcaagttgccttcatttcatatatatatatatatatatatatatatatatatatatatacacacacacacacacayatatatgaaatcgatttttktttgtttgtttgtttttgagacggagtctcgctttgtggcctaggctggagtgcagtggcgccatcttggctcactgcaagctccgcctcccaggttcacgccattctcctgcctcagcctcccaagtagctgggacagaaatcaaggcaacttgattttgtgcatgtgtatgtatataaatatatatatcaaggcaacttgacataagctagagaagcaatgttagcttttctatatatataaatttatatatattataaaacatatacggaaatatttatgattataaaatttattataatataaatgtaggggctacaagtgcaattttgatacatagatatattgcatagtgtaagtctggacttacagtgtaaccgtcacccaaatcatatacatcatacccagtaagtatttgtcatcccttattcccctcccacccttccaagtcttcagtgtctgttattccacactctgtgtccctgggtacacagagtgtacccacttataagtgagaacatgtggtatttgattttctgtttcagtgtcgtttcacttaaaatagtggcctcctgttcatccatgttgcaaaagacatgattccattcttttttatagctgaataatatttcattgtgtagatataccacaacttctttatccagtcatccattgatggacgcttacgctgattccatatctttactattgtgaatagtgctgtgataaacattcgcttgcaggtatcttttttaaatgatgatttattttcctttggctagttgcccagtagtgggattgctggattgaatggtagctctatttgtagttctttagggaacctccatactgttttccatagaggctgtactaatttacattcccagcaacagtatataagcatttccttttctctacatgacctcatttgtaaagattaaagaatagaaatgttgaagctgaaatccaggcattaggattctgaaaaaacgagagattctaatagcataacaagtttttctctgagtcagtatatcagtagtagttattataatacaatgatcagaattatatgcatgtgcatttttcttagcaaaatcctccctggctgatttctgtggggcatctcttcctaaactctgtgctttacttcactcagagaacacaaaagcattgtagccatttgcctaagcagcctagaaaaggctgcctgcttctagcatgctctgcaattcacattgtacgactttttaatctatccttacagcaaccctctgaggcagggactgctgctctccccatttacaggtagggaaatgtaacctctttggttcaataacttccccaagcccgtattggagccacattcagatcatgctgacttcaaggcctacgctcttcattcctaagctctgctgcccgcttgcatatataatgtgctataatgtcaaacagaaatagtgtttttagttaattgatgtttggrgtcacttgtgtttcattagtggagaaaacagagtttgtacttttgttaacattcatgccactagcgttttgtacagcacaatcacagaacatagattcatttaaaagtttttaccactcctattgatttttaagatgccagactgccctataaataaacataaagtgccatccactaaatttagtgaaaatcagtcaacgccaatgaaaagcagaaatcatgtctattttccaagtgaaaaaataaagttagaagaaaagtamtataagccgtcctctgcagctttatttattttgtttcttaaaccttctgctggaagcacttgagtcctgtctgaatcgttgggaagttccaggcacggtgactcacacctgtaatcccagcactctgggaggccaaggtgagaggatcacttttggccaggatttcgagaccagtttgggcaacaacgtagtgtagtgagacccctatctctacaaaaaaaaaaaaaaaaaaaaaatttaaattagccgggcatggtggcacacacctgtagtcccagctactcgggaggctgaggtgggagaattgctcgagcccagaaattcaaggctgtagcgagctgtggtcgtgccactgcagtccagcctgggcaacagagagagaccctgtctctaaactttaaaaaaagaaaaaagaatctgaggagtgtctccacgtagggcagagtttgtggcatttgtggtttgattttgcctggtgcctcctgtccttcaagactggcctttaataggaacttggtaggaagcagagatgagcttgcagggccctggctgtgcatgcagtcagtagacgggaagatctgaagctcgtcggtgggagagttcagcggaggaagccagagcatcccgagttgagtgtttcttgagggcctgccaccctgactgcagtgccggatgctagttccaaatgtcagtgcttcagcttttccatgtctctccagagcagccctacagggaattgagttaaaacactgacttggggacagacacccttgattccacatctgacctctgacactttggagctgggagggctctgcagggtaaccagagctgtttccctccccagctgaaagagggggcgatgactcacttaccccaaagatgacagacacagccaaatcttcattgaatctaaagcctaaatatagccaagcagactcccaagaatatgtcgccagggagaagagtgttgacaccaagcaacgcgctaaaacagttcattgagagccacgaaaggcagggctgtagaaacatcccacatggccccagtgagactgtaggaagatgtacttgcgagccctcgaatcagcaccctgggctgccatatgcttgtctttgtctttatagtcagcctcaggatctgtcatcttacttacacaacttcattctctccagctggttcttccacttttaaaatcataatcctttgtttctgacatcatggaaaaggttaaggtgtctccaagggacaaagaaacagaaaagatatcatgactacagctggttgttaagtggattgtttttcaagaattttcctttaagtggctagtaagccagaaatgaccaggtttgctttctggatgaattgcctataaaataatttcccatgataaatatctatatatcccatatgtaatactactttaaagctaatagtatctacaaacatattgactggttttagactggccagacttactgaggtgcaaagtactcaccttctaactactgttgaaggaaaatctatttggtcaacatcatcaggcaccatatttcagctccgtgcaattttcaaaattgattttattcttcattttataaaaattgcatccagtgcttgctagcctaagggtgcttttacagtgactctatacactagaaaaataaccaatgttttgttctggtaaagttgaataaaaagatgtatcatctaactctacttctgtaaaaccagcagttcatttcttttggatgcaagggatgaggagctttcagaggggaagatgctctgggctcagagccgtgtgacacctcaggatcctgcccagtagggagacagtgcagggaggagtaaagtcctgagtgccagccttggggacccacagggattctgtccccaacctatcccaaagcccaatttcctgtggaataatttccttttcaggataaatatatattatttcaggtttcaggcagatcttggaggaaaggagcaaatcctcactgcctctgttgctgtttttaagctgcagccagaaagctcctattgagcaactcaggttccttccatgtggggacgattggacagtggtggtgttaggtgcgttggaacgtgactacaattggaattgatttcttgacaacacactgcctgtgtcccattcgtgcagatagtcttttagcagtgccggtctgctgtcagcttgtagtacctgaattatttggattttgattattcgggggaagttgttattcccaaactggtttccttcagcatctcccctggagttactgcatctcagaggatgtaaagtcattttcacattagtttgaatatcccctaaatggaactggtgcctgagttgaactcaagatctgtctactttccagctttcctgggaacatagcacaagtgaaatggttggggccaaagttttgctcagattttaggggctcccaagccttgctggggaaatgacccaggaataaaaattgtgggcaccaaaacaggaccctggacccctagttctgtgttccttgggagaacacacccgtgatgtttgtgggtccatttcagagcctctgcagatccctgtattcttgccagcagcagtggaggttctgcattgttctagctttctcctgacactcttgaggggggggtcgtgtttcctgtgccagcctcacaccaccagttaacttctgtttgttttctccactgacgaggcctctctcaatgagtaatttttctgttcacaggagcactcgctgaaagattattgcagcggcttcttgtttctgtgaaaagcagaaggggcaccgattcccgtgaacccacccaagccaccgccccactgaacattccagtccttagccttgccctgacgcctgctttctggctgagagccatcactgtcctgggcctctttgcttcattgccatccccagcactagcatttggtgttattttcagggccatttttttttttacatagctgttgtatttgagttttgtttttctcactttataagaatgaccaaatccacaggaataataaagcagcagtgcctgcgttgatacgcaggtgatgagcctcctccagcgtctgcacaaatgctcagcagctgctcaccccagcacccccgccgcaaaggggacggatgcaattccagtgtgcgcctctgcaaaatgacacactgtgacgtgggagagccttgtccagtggaaacccctgtggttccgtctgcagatgtagagcctttgtatagtcagcagctcccatcacaggcatgacctgctcaattaggtaggacttaccctattagaggaattagaatgcaataataaataaaatacaatatgctyaattggtatgagaaataacaagatttgtcttgttcaggactgtgcagtgtccaggtctgggtgtgctcgcaggaccttttctggggcagcagtagcgtggggaggggatgcagaggcaaggcagggggcaggagaggggcagaggagctctggccgccctccatccccggagcccagtatggcctgtgcagtgggcgtgcagctgtcttccttcctggtctgggaacaggtgtgtgtcatgccacagctgaatgccacgtggcctaggtgtacactggcaaaggcagaaagtaaacctgccattttctccttctgatttcaaagttaatttccttgcaacatttttaatatgttaagaacctttgaacagctggcagctctcaaataaaataatggaagtgtgggaaagtgctttcttcagatgagctggctgcctcccattgcgcctggcactcctaggtgctcagtttcggtcccaggcaggcaaagaccatgaccttttcttcctcaaaggcagtgccacacagaggttaaaagcacaaaccgcagaggtttggtcctagttctagtgctctcttgctgtgggacctcaagcaagctagtgcctcgtgtcctcatctgtaaaagtcctgagagcgctgagctcagagagttgttgttgggatgaattgaggtaatgtggagagagtgcgtagacagtgcctggcgcccatcaccgctgctgctgtaactctggttatcactgtcctcagcagcagcagtagcctcacgcagccacccacagggcctggttctgagctctgtgtctagcagatatttagcagatactcttgagcacctttgactagcccagaatggctcatctgggggtcccttgtagctgtcagaacgctccctgtcacataaccagctgttcctcaacttgcattcttctgggctgcttttccttctctgagtytgccactgggcagctggctctatcaggtttccttctcgtaaataaatatagtccacctcgttcctggcctatcgtcagcttcacagggtgtgtgacttagaacaagaaatgcagttgagaaatcagccttcatcctattccaactggagagtcttccagcatttgcatttgatcatctctgaaggtgggatgcagaagaccgcttcgaggcaggttgctcccagggcctagtgcagggtagactgaggttccttccctgagcaggcagtggtggtgagcaggtccctctgctttgcctcacaccagcattgatcacctgacaaatcattagtaatcaagggttcctgttaatgtctgagaggcggagccagcactggttctgggtgtaattcagtgctttgggaaatctgattaaaatgtgaaaaagatgcttcccagtcatagagctgtagagactgtcaggtattatacaaaagacaggaccgctcatgcctgctgctttagccatctctgaaggaacaattagagtcgcagtcagccagggaacttgactctctgtgtcgctgaagttgcagttctattgcatgtagggtagattcatcctgagtcgaatgcttgcttgttgcttttgaggaggacattaaaggttccctaatgctgtagcctttctgcattgctcttcatatgatttttatgtaagggaattaccagctcactgtttttctgagaaaaccagatggctgcactgacatgttcaccagagactctgagattcgtgccaagcttattagcatttgccaatctcatggaaaaactaagaagatgaggaaactagaatgtgtgtgtttcttccctcagaagcagcttctgctatgaagagcagagcgggcagcccatgtgcagcttttattgatccatcatttcctgggtggctgcagctcagcctccttcagccccactcgctatagctcaccccatcaccaccacagattttcctgtctgctttaaattgtggactgaaactatgtatcccctagtgaagtacagttccagctcagagaggcttcatcacagcactgacatgaaaagacaaacagaaatctgacttgccgtgttatccatccaataaaaaaaccacccaagggtagaggaatagatatgcatcacgtcccagcaactcagccaagcctgtgagtttaagtgcaatatttctaggtggatttagaaaaccctttccctggcaaagcaaagagttctcctgacagctcattttaccagtgggccagcctgtctgggttagaacaaagggaattctgcccgtctgatttgggccagatagcagttttctgcttccccagtgatttgtgtactattgtagaagtttgaatacttttccataagttaagcagaacttcctcttcaagttgcctggctctgcctttatctgtagtcaagcttgggctgccgaggtggcctctgccctggtttagcatgagcagaataatagcactggcttgaaaagagattaaagagatgattgcaggattattcagcaggcttgtcaccagagaatttatctgttacaaagaacatgtagggttttttattattatggaatttctgctatgcctgtgtgtgtattccagcagctgcaatagctacacttggagagcacttttgttagtatatcttgcttctttccagtatctcattttttccagaaaattcttttggttaatgaagggtctctgaaaggagcaggggtagaagccttaggtgcagtgtgaacttaaaaggaatatttcaagaaaagtttgtttgatttgaatttccatgggtaaaggaaatctgctacttaaaacgtatatcctctgaatttggaaatttcagccttccctttctgagcagcacagtttttatttttcttattgaaatagtaggggtggacttacctaaatttcttgattgtgtcaaaactatctgagctggcagcaagctgtagtatagaacctggtaagtgcctcagggctggtcgtatgcatagttgtggcagttgcagtatttaaaggtgaacatggtatgataagaatgcgcgcctcatgtgtgatttccaacacacatacatgctgacgggagacaccaattccgtctgctgatattaggttggtgcaaaagtaattgcggttcttgccattgaaagatggcaaaactgcagttacttttgcaccaacctaatactgagcagctgccatggcccagcatggacttagctgtagctatatcgtgaacagggagggcacagccctgactcgtggggctgacagttcagagggggagaagtggtacagtcttgatgaaacaagtctccagctgatcatttccccaggaaacgatgagaggcagggcatcttgtacctggcccagctcagaaggctgggacactgctgccctctccacctgttattaagtggcctaagtgggtcacatgtgcccatgttctccctcactttgaaaacatttcagaaccattcctgtctatttcttgtcatgatgtgagaatcagtacaggtatgatccacttttgatttttcagaggtagaatattctgtttgttctttcttgattttgctttgttttttaccctcttttctagcaattactgggacttcagcagaggacaggcctggaaagaacaggggcattaaagtcaggccaaacattttaggcccagttcacagctcagggatggagagtgcaggttacacacagcagacacggagaaagcaagtgggtttgggggatgtggaatttcaccatccctctggtctgcaaagtcagggctctctaaaatgtgtttatccttttgagaaaatgctrtgtaaatgcacagtgacagtagtagaatagttgtcattagctgaaagtgatcagaatgttctggtgacatctcagggtttagcaaagaaaaagtggctgtctcagaggaggcagaggggacagtttcagatttgccttcagaatgctgatctttcatttttggggaggctttatgtaattttctttttttttttttaacagaacgaagtcggcctactggagttcttccaaaatgtgataaaagaaactagggcagagccaaaaaaggtgactagttgggtcctcaacacttttctgggctatttaaagcaacagaacctcgctgtcagtgagaggtgagtgaggtctgggatttctttcttcctttgtgatgagctctgtccagaagtgctggaaatagggcaggtccattttttkgctccygctgttctccctcaggatatcctgacatgacacaaacatcccctgtggactccacattctaaatatgttctctagcccgtgtaaaaatgtatttattccttcaaatctgtgactgtgcactgtgtcctctgcactgtgtcagaggctgggggcacaaagatgaatgagacagacatttacaaacttgtggaggatacagatctgtaaggaaacagccaccccagggtgatcctgtcatgccagaagcatgcacggggtgctgggaatgcacaaaaaggggagttgaacagaggctggggaaccaaccagggctcccctcgggaggggacgtttgagccatgccctgaagcattaggggagagtcgctctgcagtgggagggacagatcaygcagacaaagcagagtgcgaagctcagagagcagcagcacagcaggctcaggaacgccagaagctgcaggggccggaggcaggcaggtgggaatggtggggacagagccgcggagatgaccaagggccacctggagaactgtgtctgcctttatcaccagctcttgacagccatagactacaagctcatgccagtttcacactgcggaaatgcagtgtgtctcactcaactcaggccactatattccatagactgggtggcttcagcaacatgtctttcccatgattttggaggtggggaaggtccaggatccgggtgccagctgatgcattcctgggtgaagccctctgcctggctcacagatgtcctcacatgacaggcaggagttgaggggtgaaacaggaaggggggagggagagaaggccctccaatctcttcttataggatccccattcccactatggggaccacaccctcgtgacctcttctagacctcattactcctccagggccccatcccctaaaaccatcgcgcttcaatataggaatttggggtgggacacaaatattcagcgtctgagagcagactagaagcaggaattccatttgggaacctctttcaggaatgcggatgagaaatgccccaggcctgagccaaggtggcagtggctgggttgaagtgagctaggccaagttgagagcaattatctcaattggcagaacttccagatttcttgcttgggcagaggtgaaacagagggcagactttttcaatgtaggaggagctaaaggaaaaggaataaactttataggccgggggtgagggaagatgccgtattccatttcagacgtgctgacttcgagctgcctgcaggacagacatcacccccacggggctaaccagtaggcaagatctatgagtctgcagctgataagatcttggggaggtttgcagttgagagttmtctcgttggttcattattcagctcatgttcacttagcctctgctgtgtgctaaggtctgtgcccagcatgagaagcgcagttcctgggacagacaccagccctgaatcaaagcacaggcagccttgaagctggtggctacagtcagtgacaggggtgctctgagaggggaagaaggtagcagctaagctaagacctgaggagaggatgagcagggacaggccaaggctgacagggaaaagtgttccaggcatggggaaaagcacgtggagaaatctgaggtgagtctgggcatgagagtttggggaatccagggacacagcacaacgtaagtggaacatggactcagcagcatctgtacttgaagctgttggacagatgagaactttcagggagggtgcagcgtgccrgggtggctggggaacgaacctgaagctctttagcctttaactgggaagcgtgcacagagaaggaaatgcaggcgcgatggcacagaagtagaaggaaaaccaggaaactggggggtggggggggggcggggcggggactggtgacacagaagccaagggagaggcaagtttcaagaaggaaagaatgggcagtaggtgtcactttggggcatcagaaagagagttctctgggggcacataggcaggtggcagggcccttgcaaggtccyggggcagggggagcccaggctgggtgggtgtgtcattgyctcagcagcatcccggggagtgaagacagacagataytgacaaataactcccaasagttgtttgcccaaataagktaactctagatggtgtcaactccatgttcagccactggatatggatgcacacatccatgtgttagtgtggcccgggtgttagttcccttcccgactcggctgctcagcttgaatgagttccccctctgaccctcagtttcctcactgtaaaatgaaaatggcaggacgtgcctcagagagcttttgagggaaaaagtcacagtgcccggcacgttgtgggcctcggtgtkagccaccttctctttgccagggtggtgtgctgaataccaragcacctgccaccctcctgaactcttgtggcatctgctgcctctttgtcttttttttgttttgttttgttttttagacagagtctcgccctgtcacccaggctagagtgcagtggcacaatctctgcccactgcaacctccacctcccagtttcaagtgattctcaagtctcagcctcctgagtagctgagattacaagcacccgccaccacacccagctaatttttgtattttctttttagtagagacagggtttcaccatgttgggcaggctggtctcgaactcctgatctcaagtgatcmgcccgccttggcctcccaaagtgctgggattacaggcgtgagccaccgcgcctcttggtctttcatccctgtcctcccgggtttggcctctccattcagaaattctggtgttggtgctgaaaatgtgtggctgttctgtggaggcaggagcygtgcygaagagtttatggatgggatacagctctaccagagtcttcaaggctcaacaggatttggtgagggagagggcagtgcctacctggagcccaggtrcaggaacagcaaagaactggmatgattgggaaggagaggagcgtagctggcaggagcagagggtggaaagaggccaagaggtgtggctgtgtgcagagccagagctgagccggaatagggagcctctggaacgtcagggggattcagccrtgaacccatcaggtgcagagccccaytctgcagtgtgtgggggatgaccaggacccggttctaccccacaggtgctgtcagcctcctggggaggactagaacttgtgcatcagaattttaattcaaggcagaatgggatgcttccagtgttagaactagacacagtgcagtgggaacagagaggagggagattcacaccagccagaagagtccaggaaagctccaagaagatgaggtgtttgcgcttctggaggaaatagaaatttcttagctttaaacttagtttttctatgttgttggttaaaatgtacggaattgctgaactttagtcctggaagagaacttagggatcttcagctctttcatttagcagacgaggtgacggaggccctaggagataaggtgacttgcctcagatggcacagccacaaagactggaagccaagtcgcctggcttgtgatcggcttctgtatatgttggtctgtgaagttaggggtttaacagtcattttggtggcctctaaaggagctgagagataaattagcctgttgagtggacctggagcccctggtatttacccaagcagtttataagcagtaaagttttaagaacctgaagggtacccaattctaaataaaggtaggcttggttgttccaaaatcaagtaaagaggaagcaggcaacagttgtgttttacagtttaaatggaacaaggactgagaagccaaaaccaaaccatagcagctcttttcctacacagttcaaagaacgtttagctggactgatatactaggctacccatagagcaaacattaattaatgaacagcctcagctatgagtgctaatgtttscagagcttagaagggcagtagctgcaaaactagctatagtctcacaatgatacccaggcaaggaacactctggagatcaaattggtagagaatgattaygtgaattagcattcatctttaaagacctctcagaagactgatgtttgaagggtccaacctcttgttgaacttggctttttaattgagtatattgcttgaaaggttggtttatttggttgacagcttctgaattatgagtaacagatttggtttagttaagaaagtagacatygtagatttcctgagcaagcattttgtggtaaaattaggcaggtacagctatccagctgtccaagccagttgagtgccccagtgtttcaggtgagctgtgggcaacaatttctgagcactggagcagggaaggatttkaaaccaagaagggactggaggtgagaggaagatgtgtcccacagcatgaaatgtaggatagcatccaaggatgggctgcaggcattggaaacctgttgagctcactgtggccagacccacagcaagtcagaagtggtggtgytgggaatgcaaaaggcaggatggccgtatttcatgtttggaaggatcactaggatctggtaataaggtactagatttttcagggagtaggtgatgaataaagcaaagacaacatgataatttgcactctgatacctagaagcrtggtgttgtcatcatttgagacagaagatgggtggtgggaaatgcagaggagctggtctgtgaggaagacaagtttggcttaggataaggattgggaaactatagcatgtcagcctctggcctgtttctgtagagcctgtgactaagaattgcttttacctttgttaaaacaaagaagcatatgtgacagagggcactcaccaagcctcaaatatgcgcaccctagctctttccagaagtttgccatcctggtttagagcacattgtctaggtgtgaacggggcctctcaggaggtggttgacatcaaccagggagagaaacaggacctgaggcagcagcggcagccctgggcatcctcctcacggctaggggtcaagtcagaggacccagcaagaggacaccggagccacctggcatgaactggcaaggagcagcagagggacaggcaaggaagaggaggacattccggaggcccaagaaggrggtttcacaaggagcttacggtrcagccccaggagtcagggtgcagcgggatggggagaagctgaatgtttggccmcaagcaagggggttgatttttaagagaagagcttctatagaggggtaggcacagaatccagatggcatgtgcttacacagggtaggtagtagccactggtgctagatcgttattgttaaagcaagaaactgggcasacgcaagtgactgcaaggtcagccaaaggcattgtcaagacagggaagatcggagcatttgtgaagctgtgagattcaagccacaggacacgggaaaccagcatctttggttcggaggagtggaaagagtggggttctgagcaggggtggaggggttgtttgatggaagaggaggaggagagtgccctagaaagttctcaaccgtggctcagctgatgtccttgtgaaatgggaggtgagggcatgtgcagaggaggggagcagaagggggctgcctggaacaggcgcttggtgggacgccagctaggggcactgcgaaatccgtgagatgaacacagaatcctgtgcgcagcaggtaccacctggaggcccaagtcccaatgtcttccttcttcttgcatcctgttttaacagaagcagagaaggtggactttgggcctgagataagctgggggattgggacagrcagcatggttcacggggggtcrggggtggttgtagaagcatcagcgttgtctgctctcatccaagcaggagatggagctgtgatcctgaatgagctctgagggactggacaaattttggagctttgaaagagcccctttcccctcctctgtcgaaccgcggcctcagagaatgggagggaagagagcagcacacagagctgaaggccgcrgtgtcagtttcttcttcagcggagacgcattcactatccagaaaccagtattacctgacaacagcaaattagtagcctgtgctgctgctgccattgcgtgtcgagtctgagggtttatttatttaggcgatgagtggggtctttcggggtctgtgtgacaggtactgatctttgtcatcrtctgactcaagtttagccctggcatatgtggaattaacatgtgcagtctgccagacatccctatgggtgtgaggaagcctgtgacacaaatatgatgacctactgtgtgacaggcatygtagggacagaaaagtgatggagaaatcccaagtgtgattacgtcagtggaaagattttgtagtctaaatttatgaccyaactgatgaattaaggtccttagatgaacttctcaaaggcgacgttatttttagttattttgtgttccttttctgtccctctccacccctacgtcttttaygtcattgcggcgatctgaatgttgggatcctcccccaaattcctgtgttgaaatcctgacccctaaggtgayggtgtgaggaaatgggacctttggtgggcgattaggtcatgagggaggggcttttatgaatgggattagcaccctcatcagagaaacttctgagagctccctcgctccttccaccacatgcagacacagcaagaaggtgccaccagtgagaaagtggaccctcactagacatggaatctgccagcgcctttatcttggacttcccagcctccagagcagaaataaagtttccatggtttataagccatgtcgtctttggtactaacctgttagagcagcccaaacagaccaaggcaatcatcgacttgtatgggcctagggaccttatcttttgcacgctcaagaaatccagttccacctcagtgcttcttatgggttctgcacacagtctgcattctaagataatgggccatggtattttctaggattgcagaacatccaggcaacccacgcttttagaaaaatccggcctgccttttacttgttagtaaaggtaggtttttttagtttgtttagccgcccgctgcccctcttccttttgaggtttaatcagggtggttcacagatgttctgaataccaatttagtaacaccagatattctccaaacctaagtttcacttggaattgccttttagtcatactttgggataaacagacacttacaggatgatgggctgcctcagtacatcagctgttttaagtggacagccccaatagggtttcactgcacttgaattagagtacagtaagtcagttggttaacacacactccattggtttagagcccgggaaatcggcatagggactaagctgtagtttcctttgtattttctaagcacatccaaagaaattaattktgcatgatgggaaccaagacttaaatagaagatgttttcaagtggcatgaagcatttcagaagccctcatttacacagtgtaacactaatgtgctattgatgtcattcctacctttttaaaaccagtccccaaatgatctcagataggcagcatctcatgagcctagttgctataaatacaggttgagtatccctaacctggaartccaaaatgcttcaaaatctaaaactttttgagcattgacgatgatgtgcaaaggaaatgctcactggagcatttcagatttcagactttcggattagggatgctaaactggtaagtataatgcaaatattccaaaatcyaaaaatatccaaaattggaaacacttctggtcccaagcatttcagatgaggtaactcaacytgtatttagaagtcagaaaaccgtgcattttaaaagaaatagtttgtaattcactgttgtcttttccataatttaggcactcacccctaccattaattcaccttcaagtgaattaatgacacttcgctgtttcactatgcttggatgcccctgaccttttctttcatgggatattggcaaataagtcacatcctagaaatataggtatagtggattctaggcccttctgtgtccagaaagctgtgtgagcctggagaagagagttatgtatcaggttcctgaggatggatgaaaatgtggctggtagtcattgtgttcccttgcagaaaatctcttgcaatttaaaggaatttatatttgcacagaaacactcagaaacgtgactttgttagctggtttttttttttttttaagtaatttttaggctgatctttccgttgaaaatatttaattactggagtttgttttccctttcctgttgtggttcaygaattttgcagccacctccttttcttgactaattacactgagcagttgtctgttgctacaacttctgccaaacagctgttattgttgggtggtgaaagaaagaacactagtcacaaaaatttgttatatcctaagatataaaataaataagtaaaataaaagagagcccagttggcctgctgttttcatccctaggcgtgggtccgmtatttacccccactagagcaagtgttctgattccgaacagccattcatggatgccctgacagtgtgcaatgtaaatgtgttttctcttttgggggccaccagtcctgtcacaccctctgcactcgctgagcttcttgacctgctggacagcagaacaatttcttcatcagcagctaaacaggkatgtccacactcccgacagcttctgactgtgctactgtcccaagaaatgttttctgtgacacccaaatgccatcactgagtgactttcatcatggaagtattaaatgccagtagtggtgtttttaatgctgaaaggtagaaacattttatttagcaagcgtatgaagccaatatgtgcaatgcaggcagtttgcttctcgtcatcaccgctaacctggggaaatagttattgtctggtcttgccctgaacatctccgcctgacrtgtctcctgtagcccttttacacctgagaactttccctcgtgcccaaggcagcctcagctcagctctcagcctgctggggctcttgtcccgcccccacaccgcctcccagccagtcccagggctcccttgtccctgctgcatggttgccctcagagagtctgtcctcaacaaggagggtgaagtcagactctgcactttgtagataaaatgttacagacatgcccggtgtgtgaaaactcagaaaaayagcatcatcctaagcagccttttgtctgtctatacctctgcctaagtgctaggcagttgacagactcgtggaattcagaarattcttacaaatacatacccagagggccgggcacagtggctcacgcctgtaatcccagcactttggtaggctgaggcgggtggatcacgaggtcaggagtttgagaccagcctggtcaacatggcaaaaccccgtctctactaaaaatacagaaattagctgagtgtggcagcgggcacctgtaatcccagctacttgggaggctgatacaggagaatcacttcaattagggaggtggaggttgcagtgagctgagatcattgtgccactgcactccagcctgagtgacagagcgagactccgtctcaaaaaacaaaaacaaaaacaaaaaaaacacataaccagaaagatcaagaacaccaaggtggctgcctcatctcagcttcagtgatcgcagctgtcaatgcttcagccagaagtttaatgttattttaatggtgccttttgcatgtaacgtttatctgcaccgacagtagtggcaggttacaaagggaggcttggggaaagtggctgctttgggataattatgaggcaccatagtgcacgcaccgggctgggtgctgtggaactggagacgggactaataaaagctctgtttacccacctcgagtgaggctgtcaactacagggacctcaccgcgtttaggaaaggctcttgcttgtctggatgtcaggggaatacaaatgtttatgacaatgctgagcagttgcaggaagtttagatggcctgagggcagaaaaagcactatatatatatgtagagagagagagagagagagaagaacacattgaattattgcacgtgaaatgaaagaagggaaaaaccttccccttttcctactcatcctgccccacaacacaacagaacaaaatacctagtgcggtgaataagatagttccagtaagaagaaatggaaaatgttggaagctgacagctgggttcagatgtagggacgctttcagattttatcagcttccagcatgtttaaaggaggggacttctgtgaggcagtcaagcgaaaatacaagcctggctagaagggtgtctagtgtgtgttgcttaagggggtccccgtgatgtatcattgccttggggttttttttgtttttctaccttttttttctgtttttaggaaattactgattttctgggggaaagtaatatatgttgatcataaaaaaatataagtaatgtagaaaaacaaagattctcaggttctaccaccttgaaataactacctttaatatcagatgaacatcatgaaggaagaaggaggaggagggaggaaggaaagatagcaataaagactttcaaaaactgaagttatggtgtacttttttttagtttatttcttattattaattatatagtgtcaaacattttatctggatattttatgtatttattgactttgtattatttatttatttttattttatctggacattttatgaaaagtacatctgtgttgcggcacgcatcagtccttcacgcctttttagggctaaatggggctgctcgtctgccaagccccttcaccattgtacggacacattccattttgtctgtccattcatcagttgatggacatttgagttgtttccacattttggctattaggaataatgcagccttaaacattcatgtacaagtttttgcacacaggctggatgtatacctataggaatggaatttctgggtcatatggtaatgctgtgtttcattcatataatgaggaagtgccagactgtattctaaaatggccrcaccatcttacagtctcacctgttagtgtgcaagggttccagttgctccatgtcctcaccagcacttgttattgtccatctttttgattctatagccrtcctagtgggtgtgaagtcgtatcagggaggatttgatttgcatttccataatctgttgagaatatttttgtatcttatttttatagtgtacttttttaaaaaagaaaaatgtgttacagatatttttttccaaatttaatagaagagtccaagcatggcttgggttttagaaagctgtgagccagaacagagactctctgatcctactggttattggtgttgcctctggcagaactggaagaggctccaataagtgattagatagatgaccaggggataaggaagaaaggtgactgagtgactgactcctakggatgacagacacacagaaagaagaatcatgtcctgagagcagaattccgaattccaaagaacctcccactttgtgctctaattggttatgaatctgcctttctctgcctgtctctcacccacttccttgtgcattatcttcattccttctgcctttcactgcaccctcctcccaggtgtcctgccagtgctcccgacatttacaaacctcatcccttcagcaccccagagccaggggagttaagaggttgctgccacaaagcagccttgttcttcagaatcagaaatagaagctgggaaattatatatcatcatgagcagttatctcctgggaactgtagacaaaagcaccccgtgtgcccctcacaagacccaggctgtgtattgaagtggcaggtggcaccccgtctcctcccctcactaaagacagggtcagcttggacacatcagactcccaaactgtcagagttacagctaacctgaaaacagcctcccaggattcccaagcctcttgtgactcgccctggatgtcgtccagacagctggttagtcatggttcaagggaaatcgcatgggttgtgtaggtgtacgaaggagatccttcatgcacgtctggaaacagatgcagatgatccaccatcccctgaggattgtccagttaacgtttctggaattgggtgccgcagagatggaaatcgcgtttaacacacaagtgttccataataaccaatctcttgtctactttgtggtctgctttaaagagaaatcgccaaaaaccttttaatgtacaaaatgttatatatcatgcaccaaagctgtattacaaatgactagatgtctttttctctctttagtgcttcagttatctgcacagtttactgggccccgctttattaggggcttgggttgatgtttgtgcctttctagaaaagtaacctttcacaatacttgcctttgaccaaaaagggggctcccttctctgtaactgtgacagctccctccatgccatgtcccttgaacaggtctttccaccatatcctgaccttggaaacccaggacaggcagggagaggctagagtcttgtgtgctttccttcaggatacttcaaaaatagctttagctagaaacagttgggtggcaactaagagggtgtgtaaattcagtcctcagggaaccaaaggccgagtctctgccccatgtgtcagagccggctccagtgtctgtgtgtgatggggagttcccagcttgcattacccagtactcctggtcggccatttattaacacagaggaccagcactgtgctagaaattccttgttacatctgtttgtcttgggtaggcagcagcagggcctgggagctgcgctcctggctggaaacagttgcacttggatatcacttctcagggtgggattaaacacagacaaaagctgaggatttatgctgcagcacagggctcggcagccacagaggccactctgtgagcgtcaagagggccaggagcaggagagtctggcctggagayagggccgctccactaccacccagtggctcccaccctcctggactccagccaggagtgcacaatcctcgtcttaaataggattgagcaaaggatgggacaaccggcgtctgttgtataagcctaggggrctggggactgggggcctcgactgtcatggccrctgcactaatttgtggagttaactaacattatgtattctaactctgggaggaaaggacatttcagccaccgggctcccatgtgttccaggaggctgctgaatgatgtttctctagcggcactgcttggtaccaccccgcctggccctccttctcggggagcagccagcctcttcgtttgaaggcatctgtcctagaggtgcactgcttctccttctgaatggtgtgattggaagtgatccccaagcactctgccactcttccgcttattttggcccaggcaaatccagccaacattcgagctgtgggtcccgtcagaaagaggctggctcactggccagcctgctcagggtctgccgtgtgcttcccaccgcagcagctaccacaggcgctgagaaatcgctccctggtctgtgtctgcagacgcagacccaggaggggccccgcctacttccaggcacaggctgctcgtccgcctggttttcctggagggaactgctgcgtagatttttcacgagcaagtccttacaggtggtttctgttttgagccaggttttcagctaggagcttttttgggagtctgtgcagatgaacaaaatcaacactggtcaaagtctagatatctacgaggaggggataaattatgataaatacatctgatggatactagctasatctttttattaagaaagtacttctgtgctaaatgaaagaaagcaggacacaaactgaatatacgttatgatcccaagtatgttacaaaacagaaagaaaaagatgggaagaaaaaacaccaaaatattaacattggttttcttgagaaaatgggaattccggtgatctcttttgatctctcctgtatttccttatattttctgcagtgaatgtgtattaacttttattattagaaaatgatttttaaaatttaagtcctagttcaaaaaataaacgtgtcagagaaagggggcagatggactcctccgacttacagggcagctccatggaacgccatccaggtccccagtgcttctgctggcagcactccactgataagcatgttgagagtgaggaagtttcttcccgcttctgtgccccctttctcccaatggtttcctcattgtcaggccacgtacatayctgctgaattgagttggaggcacgtgcattctgtatttttctaagagtagggccaggcttttcctgagcagtcgggcagcggcagaggggtgccctgtagggagcttacccaggacctgccaagcacacctccttggccacagtcacagcgcacgttctgaggcaccaggctgaaggcgcagtgcctgtcccagcagtgataagtatttgwggtttgtttttgaatcagactggggaagactttgagccctgctgagactcagagcatctcccttttatttgctttgctgttcgtgctaattatggaagagctctgtttttccaggaggaatggctcctggttggcccgttctcggccaccaaggtaacagggaaagttgggtgttcagtcatgactgtggactggacggaggtggcaccggtgggagaccaacagaggaagccctcctcccggctcccaattctggctttcgctagaagacaagagaaatgaggaaaacagctaccctaggaaatagccttccttgaaaatggtttcctttttctcaggtttgatgaatttggggatttgttgttgtcattttttaagtaaaaaaaaaatgccccaaacattagcgttcattatcctagtctgatttgggtccggctctacctgtaggagatgaatgtggtaggccagggggcccctgtggattctaatttatgttttcagttgtttgccattttgtatcttcattacggggctactttcctgcctccctaaagtcatctttcccagcatgctgtttctggactttatttagtaccgtggttacctcctgcaggctgtgtggccccatccttcaccaaaatgtcacctcaattaattcggcggccatgagacagatccatcagtggcccgccgactcccgtcagcaggcgcccatgagtgatgggcacctccacgcctcccgcggcccccccccgccatgtggagtcagccgggcaggactcaccatccctctgggcacgagggcatctggctggcccgagtcctctcacaccttatgctgagggagacttcagcctcaggaggagaccccaggtgcattcactccacctagctggccttgttccccagccctgcactcagggatgcctcaggagagccaacgctctggcagggcagccaggtgccctttccctttgggccaggcccaggcagtggggacttaattgaatctgctcattcccaccccagctccacacagcacagcactgcaaatggagctggcagaagagctgacttctcatttctctttcctctcccttctctggtccataggtgtttgaggaactgtggaagagggaaggcaagactccagggcagattgtttcagaaaagcagcttgaactgatgcaggaccagggggcactggagcagctctgccactctgtgatggaggcccatcctcaagtggtgactatctcgggcaggggagagggccagagccagccccaggacatgcccaagagcctcgccatcgctccctgtggcagcccagaggctcttcctaagaatggctgacccagtttcatcaataattccctcactgtcatctttttagttaaggtcagaagagatgaaataggtggatattggaaaaacacaacttcttttcctataagaaggatgccacccctggagtttactctccatggaggtgtagtttaaaagggtgtcagcaagctcacgaaatccaagctgtgacctcccaggtgtgtcgccctctcccagggttggcatttcgaatctgttgtggttagcgctacttcctaaggacctcccagtaaagaaccagcaggtgtgccggcagagcagggagagtacaggaacttcagcttcatgcttctaagaggtgggaagaaaggcagaagggaaaagtattcataaattgtggagaaaatccctgacaggagcatgrctgaaaaccaggtcattttgtgttctyagcacagcacaagacataaaagctaaaacgagtggcatccctccctccccaagtctaatcatattgtctagagatattttttcagtggggaaaaaaattgtcggcatctttttcagaataatacccacccacccatcagcttgccggggacactcacagctctgtaaagagctctcgataaggaaaatgagcctgcactgggcctccacagcctcgtcttcctgcctcatctgtggtgactgataaagacgtgccagtagtttcaggcttgttctgtggcacttgagtgcagatcctcatgtcattgcccttggagacgctgcagagcaggaggtcacgtggtggccctaagagtcagtggctatctgataggaattcagcacctcctggcttcctcactccccctgcccacacagcacactccccccracccagcgctctggaagacycggccagtgtgtagatctgctttctgataaaggaatcttcttggtggggagcagggggagaaggaaagccacacatttcagctgaacatcactgagaatcagagaggtgtcctcactgattagacgcagtgattcatcatctcagagagattatccctccccagactcagtgtcctcggtcattgtggcgtcgcagaggggagggccctggctcccacgtgccagcttctctggctttcggcaatcacttcttgctcattttaatcagaaagcagagtagcaaaaatctcctttgacaggagcctagaaacctactcagaagtgaggcccctcccctttttctgttctacattttatgtctaatactagtggaaataagcggaatttaattttcagtaaacttaagccttagtttgggatttgggggcatgaatcccttcattttctcctcttdagtaagtaatttctgtccttctaggtaatggatgtgaagaacagaaaccccagagctataaataaactgattgggttggtccggaaagcgactcaaagccgagcagatccagtcatgataaaggagatcctggagaagaagctgtcattgtgagatgtttgggatccccttgcccaagggacaacaacaaacagtgcagcctgactgggaacaggatcctgtgaaagctgatgcccatgtgccctgagagctgcctctcaatccctgtcccaagccacagctatggcrttaatgtcaccagtgttctcaccctctaggccctgtgcctggaggtgcctccacagccgaccagcagccaccccgcctgcttcatccacatcaggagggtccggtgaggctgcagcagtggttaaggagtaacaccttcttgtattaaggaattttaaactaaataaaatgtatgttggagatactgttacccattctaagaaaacttttcattctgcagttccttcaacaaatatttttgagcaactcctaagggccagccattgtaggtgatgggcattagcagtggtcaagagagactgtaatttggatgtattgttttcagacctaaacacaggttaacaaagatgaaaatacaaccaaataaactggcacagtataaacacatttgtttgtttaaggaggtctcaagagggtggggaaggaggatattattagaattaatcaacctatcgactgagtagaagtgatattgcctgttaaactccctccccatcccagaaggcacagtctgagaataaatgaattaaaaaaataagttttccaataaatttaatcaataaaatatatactgaaatatcacataaaaattaacttacacttcaaagattgtgcagctgacaactcccccaaatcccccaaccctcaggccaaacaagataaaaagaaacaagaaaaaagttgtaacatgaaattgacttgttttgcttggaaataagattataaattagtaaatcaaaatcttgacctctcatgataatcgtggtgtgctgcaggcatcacgatgaaggcggggctgtctgyactcctgtgcttgcgacactaatactgttctctccactgcaccggagcacctttgttcggtatatatatgcctttgttacctctgactcacgtcgcttaaagaccagttttgcaaatgttgttttttaaaagcatacttgtcaaaactgtgatgtaagagaataaaatccttggaggccttgatttgaagctgtgaacctgtagcctaccaaggacagtaaaaacattcccgttgtgaacactgctccagaagcagctgaggaactagaaaaaagtggacacccctccatcaccaattcagcgactcatgcttcctggcttgcacagttcctcaggacttccctgagagtgatgagaaaggtgcccctcttccccagcccaaaaggtaggcagagaaaggtaaccagttgcgtggttcattttggacaggcatgaggaggtggctttttaaaaaaagtcgtttaaaaaaattagtgacagaattttaagagactatgtgaccttacccgggaagccaggtgccccgcatcctgttgcggtcctgaaaactactgggtctaaagtaacatgattttcaccaaatctctctacaagacagtaaggctgaagcagttctctcctcactctgcaagtctgaattacaaatgggcaaaggtggtctgagactggagtctgacaggatctttattttgtaagaaaggagaaggttcagtttcattttataaattctgttttcaccaaaagttctggcttcttggtgactaaaccttacagaaagcatcgaagatctttccagaccatttaaaattaaaggcttacttaaaagggggtgcagccagaaaaagacatttaccaaaactattatgtcaagtgcaaactgtattaaggactgattattcccagaggaagatgcccttgttaaagcacttgatttgtccaggctgattctcattcagctctgacaaactgcctgttgtcttgaatgccagcttctgaaatcctgaaagccaaaccttgtaagttgatatcatcactgctgctaggaaaaacccaaagcatggctctgactgaaacccgatgagatattctaaagatatgtttacattaacaccccaagaaattcgcaaagatggctctgcttataaaggggcctcagtgaaatacaattttacattcttgcatgagtgtgcgtttagtctggtctactggttcacccttcagggagaaatctcattaaaatgtatgagttggcaccacaggtgatgccattgccatctgtctcaggaatccacacacctgtaggctgggtgtataatgctgaggctctgactagaagttagaagtgtgctggaaaactggctctgccccaggctggcttgaaccagctctgcctggtcaggcccaaaccctgtgttctgttgcctggggaggaggttggagggttctggtgggaaggcaggaatgtgccagccctagcactctgcatgctacctaacagagggagtattcagtaaaagctcgcttacygtatgaaacaaattaatggacagccttttgtggggcccttttgaagagacactggtgataccaactactaggcttctgcgttctgggtcatctgggtctagaaaggagctgtttgatctctgtccagggtcacacatcacagtgaacttctgttcctgtctttcaaggtggaggcctaggcctaggaaaaagaacctagatcattattgcaccaaagtaaggatattttagctgagctcccccaccccatgtacattttagtaattattgctaaaataattactaagatggcctcgaagtttcggaaagtacacaccctccttcagcttggagttggttagttcaggacacagcttatggccatgacccgctattttatattgtatctttcatttccattgaatttagttgcatagtttccacatggtgactattggggaaaagccaccagatctatctgaaaggccatattctttacccattaccaaaagcagcatggaagtggctgccatgcctcttcagcaggttttagacaaacatattcatggattatttgcaaatagagctgacccttgcttgtgaggtgggaagcatctgattgaaacccttagtcaaatagcttagcaagagtcgtgtaagtaagattgtcaacaccaaattccctcttttaaaatatccacagggcaaaaaggggccttgttacaggtgggcctttcatagacttgtcccagtaaaaagtcagctgacacactaagcagcacagacttctgcagcctccgttccatgaaatttaatctggcctaagagcttccatcacctttgttgggttctgaaatgacacagtaaatctaaactccccgaaagatgcctggaatgcatgtcgaagtcatgctgacaggtcctattggccgtcttgttacttgtgtaggtaacagtgaactaggttaacttaaaccttttaagacatgaacaaaattcacagtgaccctacaagctaggaaaggtcagtcctagctaaaatcatgatcagttttaggattctacgtgcaagaggtcaaagaactgaaggcttccacccaccttctcctggtcattcttttccctaaagaacctctgaaaatctttcactaaagtcctgtttatccagttattgagctgccaggataatctgtagtcccaaaacaagtaatggcctaataaatgcctgaatgtagagaggatttactgaggcaaaattatcctaaaaaccattctcagtcttctgagagctctttctaaagcattaggtttacgaggttcattcaaaaagaagggggggraagagtcaactgcattctcttacagtgtttcctcagtgatgtgatttaagggtggaacataaagtggtttgacagtgttctgttttaagctgttacttgatggaaaattagtgttgtgtkatttatagactgatggctgaagcaacaaggggcctagaatatcttcctaatgacttaaagctgatgtggcatcagctacaagagactgctgtttccaggaagagctcacactgcaaagcaggctgccrtttgcagcaaaccacacatgacaccagcctgagccagtgacttgaagtagcacgtgcaataatagctgacctgcaataaagtgtttcataaaaatggcaagcatgacagacagccatttcagtaaatacagggctggtaattagcaattacattgaactgcccttaaatgagaactggggcatatgcagatactgaacaccacgccgggaccatttaaaattaagggcttacttaaaagggggtgcagccagataaagacagtttaccaaaactattatgtcaagtgaaaactgtattaaggactgattattcccagaggacgatgccatcgttaaagcacttgatttgtccagactgctgcggctgtgcttccctcctgaacacaacctagacacactgatccagattcagaagagcagcccatccacaaccctaaacctcaaacagacctgggaatcagtccacatgacggccacagccaagctgatttggagacactggaaacaactttcgaccctgagtacccactggctgcccaaattaaacaggcaaccccaatattcatgtagcctgtttctagattctgttcataagaggatgctttcctgacaagaccctggctccatgatgtcttatcctggacagaaactaactatatctgacctaaataaaatccacctgctaaggaaagggtactcctgatgacctataaaaataccgaatgcgtcctacctaacacctgacagacatccactccaacccgagcacatcaaagcattttccaaaatgatactccacaaaatggggaccacttcacaattcctctaaataccagggaaaggaggtatctaatggtaaagaaaaatcacatctctaactggctattccagcactcccatttcatggttgggaaattgtattttaccacccatgaaattatgttttaggctgaacctaagttggaatttctttgtgtaaaattttaaaaaacatttacttggccatttccaaaaaatcaattttaaatatcccagtgctctcatatattttgaaccacagaagtcactcagtctggaactttaagtcgggccctgaattatgaattgaggttaatgttgtgatactccaggaacccttggctccctcacctttcctgcccaggccagacgcagtgacgccagctcaggggctgcgccagcgggcggtacccacggtttctcttcccctacattcttccagcaaggagcacagcgactggtgtaggagcctgtcacatagagaagtgtccacactctcggaccatatctttaagcatgccaaacatatttaagattttccccccaactcattataaaaaaagatatttctaagggcttgccgatttactttaggaccagaatattctacttcattgccaatgatttttttcctgacaaggagttcccattctcacccacccactccctggtttcttcatatccgcctagatcaatgttcactcccccgaatcgtgcaggatttgctcttctcccgtggatagactcagttctctgctgtttttctttggcatgtccacgtcactccctaaataacccactctcagttatttcacccagccacatgggttttcctgttctctctacatccagctccattttctgacttcattttgcaaaaccatggacaaaaacctctgaggactgtaatggattcagaaacaggaaccagtttccaaatccaaataggaagttagtgttatcgtgtgagtttgctgccagcaccccagcatgggaagttacattctcctgcctgtcactgcacacaccagtcatctctgtcctcatttaaagtaagtctacttcaggctggacccagtggctcacacctgtaatcccagcacttcgggaggccaaggcgggacgatcacttgagcccaggactttaagaccagcctgggcaacaaggtgaaaccccatctctacaaactataccaaaaagttagctgggtgtggtggcacgttcctatattcccagctactcggaaggctgaggtgggaggatcacttgagcccaggaggttgaggctacaatgagctgtgatcacaccactccactctagcccaggcagcgcaagatcctgtctcaaaaaaataaaataataaagtaagtttatttcagtacctattgaaaaaaacagtaagaggcacaaaatcaatcttttcccaaaggaaactttccacaaaggggaccatggtattctacaatgcagaaatatggattcaagaagaatcaacaccaccaccagataatggagaaaggtgtaaatcaaactacaaagctaaagaattccatttacagatgtggcgttggcattttatgactttgtaagtccaaacaagaagataaatacttgtgcaaaaacaaacagagtataataaattacagccgaacttccatcttcaactgttcctctttctctatcttaagctaccttcttttctaatggagagttgtgggctgtgcaaatacaaccagacatcaggaagccagaagcagaccagtctgctgtgcttcatcccttctggctgctgcaccacagctgagcaaaccatttgtcaagacaaacagaaatgtacagtgagtaggaatctttggtgtcttgcttggactatgaaacacgaaagcaaggctggctcctaacagctcaccctgcccaggccaggtctcctgttgtcatttcacaggccagctctcaatttctcattcactcaatacaaagctgcttcaagattcctgaagcacaaaagggcctccactgctccacagcattgcaggtgtggttcttccgccactgccctgcctgtgcatgaaaggcctgattaagaccaaaccagtgctcctgaggcacaaccaccagacctgtggctgccctcagggctccacagagatgcccacaaagaacagagagagacaaaccttccaatttccttccaaacaggcaggctcaagctcgttacttgcttcgcacctgcagaactgggcccaaaatagaggggagtggaatttaatatccataaaaatcagttgtttatggtctcattttcagctcacaattattctgttttcccctcttggtggtggtttaacatggctgtggctctaagtataatcctgcctcttggagcaggctgcaaagcagcagagggacgctcatacagcacgttggggccttctaatgaaccccattactcggaaggcagcatttccatgcagagtgagtcgccagcaggcacttggctttgcagggctccaggtgacctgtttgcatttacatccaaggtcccaaagtgggctgtacagttcctgtttctctacaaagtgcagcttactagcaaaagggaatagaattttaaataatgatcagtgtttttacaggctgcatttagtttatctccccatcccacccagcataccctccctgaaaaaacccactatgaaatggcttcacaagttaatcagtttgtttttataaaacacttacaaaaataatgatggttgtcttcttacatatatatgtgataccattacttcttcatctgatcaaactcctaaaaaccaaagtaatagtttgcataggtatacttaattttgtgcaaatcttactaatataaggccatcttcagtgtttaggtagtgtcatgctgattaaagtaagctctcaagaaataagaaaaattatctgcattccaaattctctccaaggacatccgacttcccaggcagatagctgaggctctgccggcaccataaggcaacacacgctggggacgacacacgtcctggaagtaaaatccaaagggacagatgatatgtgctttcgtgatggaggcaggaggagctccatctttactcttcctttatagaacagaggccaaaatgcaggaggcaacaggaccattcgcacagttgcaggtgtacaatcttcctgtgctgctgaacagctggaattctgacatggggcacttccagacatcaccagacatcactgaaccccaatatctgcttgacgtgatctgagctgcaagaagagtaactcaaagggataggagaatgacaaccaaaaaaatataaggaggaaaaacagagcaaagaaaactgccaagggagcaaccagcttatgagacttacattctatatataacataaggtggaaaggcccggctagagagagagaggaaagatacagaaaattcccctccccacaaatcaagtattgtcaggaaacattaaagtagaaatctttgtaagcagctttgcatttaacattcagtcaagacactaaaaccttacaaaacaagaacctctattaaaaaaaaaaaaaaaagctaacagcaggagtcctcaaagtcacccaagatcttgtagcacagaatggagtgttcctgggccaaggccgccagctccttcaggaactctgggaagagggcagcagccagcatggggttcctcaccggcaggggcaggttggggggtgcctcagccaccttggttctgtgggtcaggaagggctgaagcactcttggaggtccatccaaaaggttcttgccacttcctgtcctggaagcctcctgaatgggatctgaaagcagaaagaaaaccatcatggtgtccctccatagccttctaatccaccctcttcagtgaagcatgtgtttgggggcagagttgctggagagtatctagttatgagtgcagttcctataacggactaaatcctgaagatgcagcccttgtgcactccatgacacacatatttgcccaacagatatcctccaccatatagcatctgatatgagactttcacccaaaattccttctaaggaacttcatgcagaaatcatggcaagaatataggtttgtcaagaatcctccatgccagaatgtggaaatgggagaaactgacaaaggcatctcctgtcattggcttattaaggggcgatgagtagtcccgcctgctctgccagcctctcatgctgggatgactgttctccctttgccagttaagccctgacagcacagcatagctccagcagggaggctgggtgaaatgggtcactccaagctctctgcagcgggtgctccagcctctcgggctccccggtgacctccagtcttctggccaggacctccaacgttttacataaaaggagagcggaagattccttgagatcagcagaaataatggaagggaaggaagttgggtgctggaaagaccagattaagaacttcctgcaaccatggggaattagtagcagcaaatggcttagaagcctatattgaaggagggttcccatctcaatttcaataacataggcttaagatgagttcaaattttaacatatccaagtgatttgcattttcctatcaaatcagtttttactaattaaaatggttcaacatccctatttgattcctgaacatcatcagccctcatatatttgtaggaattatttatgtcttcctctgccccctacccaaacaatctcattactccttataaatcattatattcaagttcttcattattttggctgcttcttagaattcagtaccatttttcaacactcttctcagagtgttgcttaactacagtactaaaaattcttgacatttatagtactttccacatctcactactatagtctttagtgttaaaaaaaaaaaaaaaaaacaacttccacttgactgctttaaatatccttttagattaaggcttatcacagctttaatgccataaagaactggaaaagttgctgagaatctgtcttctgctacctttcagcagaaattcatgtcccggcaacagagtgagcacaaaagtgttgatgtcactgaggtacatgtcaaccttggagagcaccccttctcatccccaaccctagctcaggccctgtcactctccaaagcgcccagcaaagctcacaaaggaagctggcctgcgttccaatggggactgggacaccatggacctactcccagaccgagacctgcactgttcatgcttgttcctccacctggaattccctgccccattctctgctcacctaaatcttactagccttagaggcattatttgtacagtggttaagaccacagagtctgccacttgctggctgacctcaggcaaattgctttacctctctgtacttctatttcctcacctgccaaaagctattcatagagttgttataaggattaaatgagtcaataggtataaagtacacagggacctctgaatgggtgtcagctaccacatcatcctcatcagtacagttgccaccaacttcacaatgaatttccagtttcctgcccccagaagtcattcctatagtctttatgccttcctctgccctctacccaaacagtctcattctagcctcctctccatgttattgaccaactaaggcctgcattgcccttcagcctcacattgtttatgttttatcacctctgctagactccaacctttctcagggctgagccctatctgataacatgtctttagcaacccctaacacacttctgtattcacagaagctaataaacatttgctgaataaatgagtgaaggaactgatctcatcagtcttccctactcctgattctccctgcagctgctcgtattcctctccccattctccttcaaattcattcattctcttccaaattcattcattctcttcccccctaaaaaggggttttgtgactcatttgtctagcttgatctgtgaataaaaagtgtcattgctaaggctcatttacccagtatgaatccaagaatcagaactgtcttcactaatgaaggcagaacacccagtgagggagaccaggggctggctgggagatccatagcatgattccatcagtggtggcagcacattgacccgggctcccctccggggtcttggcctttcagtgtgtcaccaagcaccatcaaattctccattcaaaagcaagcagacccgagttatggtccctacctggccaccagctcatcataaaatgtctgtttccatctctgtaaactggggccattacctacctgatctcccttctagaatcagtgcccagtaaaagggctctgaatataagtaaatacagtgaactgttactctgtggtttggaaagtatttgagtagaaagagaaaggcatggcaagtggctgaatctcagagaccaacagcctcaagaataataatgtggaactgggaacaggacgtccgctctctctggagcagcggccacacagacttttactgctgttggaagcattagtgaggaggctcgtttttcatcggggctgccaggaggtgaagggaatgcagggcctgcataatggagcagctctggctacagacgcctgagttacgcccctcataaaagggtccaacaagcatgcacgagcacctgaagaaaaaggcaggacggagggaagtataaataaatgtcagaattaggaatggcttctgaaatgttgccctgggtctgaaaagctgcaacacaaggttttcaagactaatactgggaagatttcagaagtgaggagagagatacattatgtgttcatctccctggcagcagcattaggcaaagggcagagcacacagacacttggaaacccaaatatttggcccattaccataattcttcattgtaaattgctctgtatcccagtgagaacaggcctcccagatttgactcatttacaggaaatcatgtcacagtaaatgcttcagaagtcagctttgtacaaggggacaggaaactctcattctgtcagttaaagatgctttaagtgggggaagagtatgacttggctaacctggaaaagttagaaagttaatctaaaaaaactcaagtaaaagaaaaatgttatatccagagagaagattcttacaggtcagagccctggagtgtcacagaccttacttaaggagcatggaacccagctaactaatttgacaaccttaggcagtgagaacaagttccctgggcacatattttgcaatcatggcctccagacattctgaaaccaggacaagcctaaggtgtgagtgacccccaccccttccctgaatgtaggggttaaggctcagtgtaccctgagtatctagtgcacctcagtatatctaggttggtcagtgtgtacactcatctccttgaattagctaagacgggctcaggcacttgagtttcatgatcctggttgaataccctggacctctaattttggcttccttaatgaaaattaagctaatggtgccttttttgcccttttcagagcactgtttgataatgaaaattgaccgcttgagaaagccccttataaactgtaaaatacaatgaagaccaggccttgtctaggagactgcagaatgcccacaacttgttgcagctcttcccactcttcccatcaagaggtggggtttttgctccattcttcaatctgcgctggccctctgtcttgctttggccaacagaatgctgcagaatggaccttacgtgagctccgagtctgagcttcaaaagattttctatgcttctgctctcactcttggaacccyattaactgtgacatggaccagcctgggctaatctgctggatggtgagaaacacccccatcacctccatcactccagccaacagccacagatgtgagtaaggccatcctagacatccagccacccactgatggcagacacacaagcgagtccaggtaaaatcagcctggcccagatcagcaaaayacccagatgaccacacagattcataagcaatcataaatggccttgtgttaagccaatgagtttttgcagtggtttattatactggtaattggtgtaccttctctcacagggtgggtggcagcagcatgcgccctgttcaggaggaacacaggtcacacacttaccacccatgtgtctaaggaggccacatggcacccgaagtctaccttctcacagagatgccaggcttctttccctccatgaatgcctttgcctgctcttctcaaagcccgactcctcgctttaccagtggcacatggcctacctttctttcaaatcctaacttgcagtaccctaagagctcatcacaacccaagttctggcttcagccggaaagcacctaagagatggagaacaaatccttcatttaaaagtcaagggacattgggcctgtgaggtaaagcaaccaagatcaaatagctgcacaggggcagcatcaggacttcagagttctgggttcttttcagcttctttgaaaggtggaacaattgccctgagtttcatttctgccgctcactgccagtcttgtttctgatcacttgcctttggcccaggactgagagccttactctccccactgttcatctgccacaaagaagcctgactggtctgtgtgtggaaaagtaaaagccagtgcaatatggggcattcctgctttgctcctaccaaggcctaagtcacagctcaggggacaatggtcagcaaatcggtccaaccagagcttaaataaggtaaagcagcagtggtgctcccaggcctggccagccatcctcagcgctcctactagcaccgacccatgcccccacccccactcctcactctgccagggccctggcctaacatctcctctagagcccataaaaaggcactctcagagattttaggctgagcataaactttacttctcccagtccaaaccgtttttttgttttgtgttttgttttacctcctagggccctaaagcacacttatttttggcccaagagcctctgaaaacataataaagagaacacatgccctcctcagaacaggctgcccaaaaaaatggctcggagagtgcatataatgcctctttctggcccatgtgtgccgtgtgatttattctagcctgacaataccctacacatcagctccttgcaggcaccactctcagttaaaaaaacaaaatcccctctagaccctccacagaggaaacaggccaggtgtgagcaaggcagacctttctttaggtttaagaatgctaagaggtggttcctccctgttgcataaaaatgaaaatatctctgaatgcttctaggatccagaagccagtgcagcatctgtgaactgaggccagtaggccarggacgtggaggaggaatttaaggaggggcgctgtrgagaaacctggcttacctttggttagtgctgcaggggtcatatcagacatgtccacacggaagagcaggtactgctgagcttgaatgaggagccctgggaagtctctctccacagaagcaaactgttcaatcttgtttttcacagatgcaaggacctgtcaaaaacagcattactgatgttaatgcctcaccatgaaattccactcccagttatcaatatatcttgcaggtagcaccctcattatgggaactattatgatgttagacatttgttcatttttaactgcctgggtgttctgcgtagggcaccgtcaaaacatcaaactaaatgaagctctacagtttgtctagaataaactacacagtgagcttaataggacagggaaggaaagcaaatgaattagagcaaaggaatttttgaaaaacaaaataaaragaaatagatgccctgcaaattagcacccacaaaatcaacaggtgtggatgtgggttcagctaacatacctgatagagagagcggacgcttggctggaagaccatgttggtgttgagcagaaaggagcgcaggagtggctgggggtagctggctagctgagtaatgatcccgataagcagcaaattaacatgtaaagagttctccagcatgttctccagctttgacaggactacrctgatgaatgggcctgcaggaagaacacaaggcttcagggctggctgggctcacagggatgcctttccctgacaattgcagaaccatcggtgccacatctcccaaaccaccatgggcccacaggtgcaagccagacacagcaaatatggccacgttttctcctgcctcaaaaccaaaacggaaaacaaaccaccatggcaaaaagaaaacagaaaaataggcatggctactgacattttcactccatgagcagttttgatacttattaaaattatcacagatctcgggaaaaaaaaacaaataatttaactttttaaaattaaaatatgcttttctacatcattcctgtatttcttggggctgccaatgcttaaaacatgacagccatcatctcatgatgcacagactgtatggacggtagggtttcatgtaagcaccaaaggccattaaaagtcttagtaatgaaaaattctctgtaaagaacaccaaaaacgcacaaactatgtttatcaaatagcaacactgtcaacaggggttgcctatcctgaacaagcacactgagaaaaatttggttttgtcaagtgtcgtaatgtggaacaataaaaaaaaataggtgagaggtggaggagcccctgcttataatcttagtagccttagcaactcggtaaccacacgtgaattttcagaggagagagaaaagggtgtcagttttgggagatacagttcggcatgtcacagatttcttaaaaaataaaatccgtatgactacaaaagcagtcattttaaaaaagcagttaaaaaattagtcatacaaaagcggtccattaagaaaaataggcaaaaagaagtttctgctactttgggtcactagaaaattaatatgctttgagttcattgagggcaggggaaaaccaaaaataaatctggcattaataaacttacttgaagatactttaaatttttaccataaaagtgttctgttaaacacaatcaatgagaattttgcatttcccttggtggagctattgatgatgctactaaaccatggcatgtttacaacgaaagcacacatcccttgatatataagccatgccttatgaagatgtcaccaacattaatacgagtttaacaaaaacatacttcatcacaagatgcttccttcattcagaagccctggtagcataagagagtaaaaccctttgcaaggaacagaagctctgtgtgtggaatgggaacaccaaaccgaaacctttaccacacaggggaggaacagggtaactgcaatatccctgtctccaggaacactaaggatgtctctaagggatctcaacatgaggcaccatcccctcatgtgtggcatttagcctcaacttccccatccttgggacgggaggcagaggtctttagtcactttccatgacataagaggtcaatgaactcttcagatagagactctttgaagatgcttaacaaacaactgggagacttgccaaacacatttggaaactctggatagggaccccagtttgaaagcaactaatggttttcccataaagaaccccagaaatgtcaatggcaactcttaaggcatcgcaacacaattcggccttcaaggtagatctagagggggaaggctgctgtcctcagcttcctctcacctgctcccccgcagtccctggcttagcatctatttccttccagatggagcaaaagcaggtgaattaagacatacttaggtgggcagagtcttctgtaaaacatatgaccataaaatgatccttcaacttctcttccccagtcccagactgtgccttccccagtcccagactgtgcttggcctacaaactctaaactgctgaccatgcagtgaccaggggggaccatccacaggacatcactactataaggggtgaggtgggggggcacatgagcttgaatcccatgccctgtggagaggaagatcatgtcatcactgacctaggtgaatgacggaatatcattaggtcaaggccagtagactgtaatgatacaaatggagtccactttgacattataattagcatctgctaatgaaatgactcatcactccttgggcatgtgtaattaaaaatgtattaaaactttcaaattcctactttattcttagtttctagcactaaaaaaaaaaaaaaaccctgcttaacaaaaaatgtgagggggatctggtaagcagctgaaaatcaaaaggctcagcacaattcaggaagccgcaggtgtttctggaggacagcagttttattttcttcccacatctcctaagaggacagatagactccccacctcacaaagtattacattcttcaaaatcactgagactctctccactgcccctcctgtcatccactcaccgctctcccgttcccctgcctccatcgagcctgcaccctcttcctgcacttcccctgtccaagaatggagcggccattgattccgtgcctccctcggcaaattctaccctggacatatctctgatgtggacctgaagctccacctcccctgctccactgcctaaggtcagtctcatttccggtctggactccagcaacagcatttctatgttaatagagatttaattattactgaaaacatttattaataacatcctacctgccaggcaatgtgctaagtacttttcatgtatcaactcactcaagattcaaaacaaccctaggaagtatatttattatttatccccatttaaagaggaggcagaatgctaagtgaacccagcttgtgaataatagaattttaattcataccacctgttccagtgctcttacccaatgcattatcttgcctgccaaggagagagagggagagggagggggagagagagagagagagagagacacacmcacagagagacctagtatttttaacaatacaccctagagaccacacctcgtgtcaacacatacagagctgtctcatctcaggaccacaaaatattagattgctagggtgttgcacaagcaagtcagtctcctactggtgggcatttaggttgtttccagtcttttcctattctaaacaatgctgcaatgaacatccctgtatgtacaccttagcacacagtgtgaatacagctctgaggacattcctagaaacagaattactagataaaagcactggcgcattctgaattctgacacggcaataagggtgtctcacttgtttttcctggcaccaacctctccccactccagtgctctccccacactcctaccaaagctggccttttcagatccagtcacatcattcctcaactttaaactccagggccttcttcagtgccagggcacaaggtttccattccttggcttggcccaaaggctctccataagctggcaccaaccaagctttctgcccttctctcccacctccccacccaatgcggtcataccccacaggctggcaggctcttcagtctcctcctggtgtctcctctgcctggactatcattctcacctgctttcacctggggactcccctgcactgtccatgcccctcctctgtgaggccattcccactcccctcactgggttcccactggtcttggcatatgacaactaatcatgcatttcccactaagagtacacttctttgttggggtctcctctaaaagtctgtgaattcctttaatgttgtgtccttatttcctagcatagaacctgccaaacttcaggggatcaataaaagattgctgaacacatgaataaataaaattagacaaatggaatgctttgattttgctgggaagtgaactcatttcagtagaaatcagatgccctggagagaagaagttaagcctaatgctacagaacacactcagaagtttggaaactataaagcacacatacatggaaagagagatgtttcctaaagctgtgtataaggttcaaaagaggaaaaaggaaggttttagtgacaattacctgtatgtatcaaagagcttgtagtatgttttgtcagttctcaggtgtattatatgtaaaatattgatgttatttaataaggtgttggattagctttttttttccttgccctgagctatactttctttcctctatttacacatttcccaggaatgaagctcctctgtaagaaagctgccattctaaagaataatcttcatggctatggatagcccagatgtcctatgagaaggcaagctgtgacatgctaagttactgctgcccttttcccttcaagcgaactcttccaactcccccttccctgtcccccttatcaactgggaaaagtgggattatctaatccattttacttatgattgactgactgattgaattttaattaaaactcattcagactgaaatgttatctcaactagaactgcaagcctttaattgtggaattaaaagctttcttcctgtatatacaaatcttcaggcatcagtaaatagatgaataaatactggaggaggaggctggaagagctccttgaaatcacataaacctacttggctggctggaccagaaggcaatctgttttcatctattttgggttactccaagaggtaggagcacagtccctcctcaccaggcttctcctgggtgctacgtgtcataaaatgaataatgacctcccagtatctcattcagtcctcacaggagcaaatggagggcctgggatgctaaagccacatgctgctaaatgctagaaccaggactcaatccctggcctggtccaaggccactgtcaccctccattgctactatcttccagcccctctccttgctacctgaacaccatccagtggtcccaccctggccttccctgagcttagtgagccctctcatctatggcgattccctctgcaccatgatttgtaaatgcagattttgttggctaatatttaatgatgttttctatcataattcctcatcctaatctgcctatctttaagtcctatcctatccctttacctcttgcaagatttctacctgtggctggtagtgtatcattgaatatacccactctttcaaagagctattagttgacgtgggtccactccacttatttttggataaagattttgtgattctctgaaatgagctcccaggcaaaggcacagctaaccccaatgcctctgatgtgtgcacagctactgtcacccaacacggactctgagcacctattctgtgctctgttcactcttccagtgctagggaaagagctccaccctcacagagcatacattctactgggggagacagtcatttgttaaaaataaatgtaaataagtgctaaggagaaaaataagttagttacgctagaataaatgaagtcattaaataagacgtctggattcttgtgtggtttaatcagccctactgttttaacactgacatatcaaaagaagttactaagtaataaaatctaacctctagcttgagaaataaataagataatcattacaagaatggaaaaataaaaataaagccacccctctttgatctttacaaaaatatttgcagccctctgttagacaaaccgataatatcccttaccttttcctaccttcctttcctgttccaatatatacaagtactttcgaaagcagaaaccacaaagcaatttaagatggtcacctgtgaatggggtgctttgagtcctcacgggatggcgactggcaaaggcagcctcatctctccccacaaatggggaaggcacagtctctacagcaggcatctccgctataaaagagtcaaagtcatcctcctcatcttctagctccttcttcccctccttctccttttctcctttactctcttccttcccttcttcctccttagtgagaagcaagggatmaggtgtggggtaattctgttccatcaagccctcggcgccggaatccagctctttaatgatttggtcatactgggcaatgagctcctcgctctccgggtgggcggctgtcaggttagagctgtgctctgcctcaggggcaggggatgctaactctgagttggattctggggctgcttcaggttccctctcttgctttggctccttgggctcactgtgaaacgggtctgaattgtccctattccactcctcctctgaatctgtctctggctgggtgctgaggagggggccgttgttgatggggacactctgaacttcagcctgggcttcagctggtggcctagcagcttcctcctgagaatccttcatgtcctcggagtccttctcagcacacagcctgtacaccatcacatcatcctgaaagtccgactcttctatgtaggaccctttgaagagcaggagggcattcttcttcatctcctggatgtgtttggggggatcaatgggtgctggggggcctgaaacctccagatcatcataaggccctggggagcccacgtcagcccctgaggagattccagtgtcatagctgtcatcccattccagctctgtctggctcttgtcctttctgggagccagctgaggtcctgtcttcctggggagttgttgcgggagcccgaacacagggcaggccgagctcacactgccctcctccgtcagactctggagaaacatctcagggtcgggggagtcgccatcatacagggcggaccagacacggcagtccctcatgcagcggaggatgttggtgtgggcctcccacaggtactgcaggtagctgatgtccagggctttcccatactccacaatgcaggctgactcggagaacgcttcggggaatggccgctccacaggccctgcacaggaggcagaggctggttagaacaagggaggtgtggggacaaaggtagtggatggggttgtgacccattcgggctaagactgtgtcttgccagctactttgggtctaattatatctgattaaaatgacctctgaataatatggttagattgtaagaaggaaagattaataatagaaactctaccctcacggaagatagaaaaccaatatagccagtcagatagtggctatagccgatggaaatctattatctggtacgagtcattagagaaagaagagctgatgatcgcaatctctcaggttgttgagaggattaaattaggtaatacacctgatatagtacctgccacagagtaataaccttaaagttttttactttgaatctaaagcggaaggctggtaatccatgaatctgagaaccagacgttttgtagaaaaatcctgggtttttagaaaagcctattaactcattctgtcttcctggggactatcagggatgttgatattatcaaatggtctcttagagtaaaatcatattcactacaaaagtcattttaacccaagaatgctgcttatgttaccatgactgcctctgatgttaaaagttccaacttcactactgaaatagctgcgaaaatatcttcctatgagtttacattttccctcaagagaaaaagactgagggaaaaatatatagtctatcatttcttaaacatctagtaggctgcaggtgctttatcaatgctatctgagttaattctcccaatgatcctatatggtagatattattttctccattttcagataaagaaattgaggctcagagatgaaagaacacccaacccaaattgtggaagagccacagttcaagcacaggcaatttcacaccaacctccattcttacgtcagtgccacatctttgcaagcctcacgtctcttcatgctctaaatctctaccagactgggtcagaatcgagcttttaaggatacccatttccagggcattagggtagacataattcatattttatagctctactgctaagctaaaacgttagtgtttatctcttatctatgttatgtaaaaagacatcaaatactactactggcagtatttattgcgcacttactacatgcgaggcagtcttctaagagctttacatgtcttcacttgctttcctgagaatagccctttgaagtaggtactattttacagataagaaaaaaagtttagaaaacttaagtaatttgcccaagaaagtactagaaccaagacatagaaccaagatgcagaacctaagtcttggctctgctactttcttaggcaaattatttaccccggacagtaattactctggctagctagctagctatgtcaccacccatccattagggcatttatctgctataaggcaacctcagaggcaggagagtggaaagaacatggcatctgaaaccagagaacctacttagctgtataaccatgaacaagacaattcctctctctcagtttgtttattcatctgtaaaatgggaatactaccttcttcaaagcattaaaagtgatcacaccaggagagaagttggcaagttatggagaatcataggtttaacttgaattttgaattctgaggcaaggttagccacagaatcattcttgaaaaaactttcatagtaaatttagaaagacgccaatttttaaatatgttttaaaaaataacttttaggtatgaaaatataagatatccatactaatttgcctaataggaaaatataattaaattacataaattgctgatttccatgcatctttatataaagaccaagaatccgtaagacaaccttaatttctacaaattacgttaatatcaaacatactgacattttcttagtcaagtaacccagcttttaaatacactttacctaagaaaattatagctgggtggacagaatgacattgttggggtggatatcagaatataaactggaaacgcttgactcaacaccaggactgggcatttcctagtggtcacaggacacacagaatgttcctgaattgaaacagccatatgaccatcaaagatatacagatgctcccttgctctagctgcctgccagagggccaaggttgacagagatggccatttcagttttgcttgtatgaggtgaactgtagctggcaaatagcaccaagtatcataacccctgtaaagtatttatggcagccttcctcattaggtcaatcaaatgcatgcaattttgctgtcatatcacaaatttcaagttttatagtgatatataataatatgtaaatccttatgacagatttctataagtggctcattttagaaattaaaattagggctgattctgtctcagcaatagccatctccacacctctcacccccgtcttgtttccgaagacatgctagcacacgttttcacattttgactctgaggatcccactagaaagtctacgtaaaataaagatctggcaacagaacgtaacatctgggcacgtcaataaacactgattacaacgtgtccataactccttacaaagcagaaaaggatcctaactagtcattcataagagaaatgggacccaccacataattccctgtctacccaaagggacacatatcccaaggcgagatggaactggcatccttttgtttaaagatcatcactagcgagttcctacctgaagtgtcatgcatacactttgaccagagaatataatccctctcttggttccccagcgtcagagtgatcccgctggagcagcagacaggagtcaaggcgagaagcttggccgcagaaacagagtaacagtctctctccttcacagcccacctctgactcagcatcatgtgattgcaggggatcagatacctagaatgacaaaaagaacaagcgtttggtctctgcaatgtcttgaaccattactgggactaactaaaccataacagggactccttgtggccaggggcagactcatcctctctcagctctcaattgatcatctcaccagccaccagggttcactccttagcttaatttcttctgaaagaacaacctctttgcaaagcacttaatggtctttataattcaatctccaggaacttcttcatctcttaaacgatccctcttcaaactccatgcctttgtgcccactgtcacctttacctggcctgtgctttccccttttctctgcctgaccaatgcctttcattctacaaagtccagcttcagtgtcaccttctctgagagggagctaatccctccctccactatgctcatgggcctctattaagcaatattatcttgtatcacaattacttcagtctacctcctgaatataatgtgctaccacagcaaggagctgcttcagtcatttctcttataatcccagaaactctggctcattgcaggcactgaatggcagcagcaaacaaccactccatagtgtaaaccttttcttatgttcttacgtgtggccaggagaaaatataatggtaaatgactcactgaggatcactgggccccatttcacataaaacacttttggttggtgatcaaaagcatcttagtatcattttgaacctggggacaagaaaacctgagcaaccatttctgacacacctggagcacatcagtgggcttcatggctagaataaagtgtgtttaaatgacttactttcttaacagggaaaaaaaacatactgcttatttaaacaaaaatggagcaaatgggataaagaacttatagccagagccaagcatcacatatgtgtgcaggagccaattgcagatgagcctaatcccttatgtgaacgatcacaaactttcaatcagccagagtgtttttgcttctgtatttggcatttgagaaagaagccgtgcagagaaaaacaagctaagattaaggtttttgtaaaaaaaagataaaaagtacgactttcaggacatgccttcaggcctgtaaacattcaaccatctcccatacctcctgctgatccaaatgaggaaaacctaagttgatattcccaactgatccactgcaagagccagagtcagagaggaaagaaagattccattctctgtgtggtacttgatgctgaaggttttaataatactttccaggtatgatatagcaaacttgccacttaaccttcagttttcagaaaaagcaaaccatctaggtaaggcggtcctcatcccctcctcctactgtctccatgggcagatatatattttgaacctgctgtcagtaagaaccagacacaccctgcaggtctgatgtggtggcagctgttttcataagcgcagtttcatgaaagtagaaggttacaaggacaaaaaggaaagtatggaacagggggcaagactgttctgattcttggcttagttttggggactttagcaatgaggaaaaatgaatgctgcaggcagaaaataaaggagctcttttccacaaggatatctgtgagtagagatgctctggtaaccagaaataacacaggagagagaagcattctcgcacctctgtgtgaacccaccagctgtgaacaaagcatagctggaccccagtgggcacccagagaagacaatgctgctctagcaccacaggagggcgccagggtgcacagcaggaacaggggcagcaggttgaggggtgggaagggaaggcagcagcaacaaaagggatcagagcaggagagaggaccatggctgatgctgctgtggcaaccgtggtgggagatttgttcatgcatatatttaagactccttatttgggggtggggtactgtgcctcatgcctgcaatcacagcattttgggaagctaaggcgggaggactgcttgaggccgagagttcaaaacgagcctgagcaacacagcaagatcctgtttctataaaacatagaagagttagccgggtgtagtggtgtgtacttgtagtcccagctagtcgggaggctgaggtaggaggatcacttgagcccaggacatagaggctgcagtgtgctatgactacaccactgcactccagcctgggggacagagtgagagcctgtctctaaaaaacaaaaacagataaacaaaaaagatttctcacttggtgatccctagaagtgataagtgatactttttgtgttgggtggggggtttgggggttgggcccaaggttttctatgaggtggctggggtgagagctgggaaaatctgtcctgtagccattgatgtgaactcttcctataggctggtgaggcctagagaaattcggattacacaggatttatggtatccttattttggtcattaattatttaagaaataaactgcttcaatgcttttatatactgctggaacagcaatgactgcttacagctcaaactaagcatatttcatgatttaagttgatattcatagatttttattctttgtttgaagtattaaaaatggaacactggatcaaagctaataaagctatttatcaaatatcaccagtgggtagcttgaaactatattagaataaagacttattgggaatttgcaactttacaaacacatgctttcagtagaaactaaaaattttcttctgaataaatcaaatcaagggagatcccctattggttgaaagagagtctacgaaactggaaatggggagtctattcaaatgaatagcccgccagtattctgaatggtggttctcagaggttattatgttaagtgaaataagccaggcacaaaaagacaaatatcacatgttctcactcatacgcgggagctacaaaagtgaatctcatggaagtaaagagtagaatggtggttacagaggctgggaagggaagggggaagaagttagttaaggggtacaaaaatacagctagatagagtgctagtatttaatagtacagtagagaaattacagttgacaataatttattgtatatttcaaaatagctagaagaaaataattgtaatgtttccaacacaaagaaatgataaatgcttgacatgatagatatcctaatgatcccgatttgattattacacagtgcacgcatgcatcaaaatatcatgtgtaccccaaaaatatgtgcaactattatacatcaattttcaaaagaaaagaaaaaagcagtggttctgctgtatctttaaaatgaaggatcatcccagaagaaagaatagaaaaacagactgtgctcctctgtctctgtcttttcatcactcacaggaaaagattagaaatagaatgaatgccagaatatccccacatttcaaatatgaaaatgaattggctgtcaatagtagaaaaatcacttatgaatttagtataggtatttatcatcaaactatcttttcatttatactatatgtattttgtttgagaatttaaattcatgaaactataaaaataatcagagactaataaatatctgacttcagaggtccagattttgcaaagccatcccccaacacagaaggaaaaaaagaaaaatatatatataatatataaataaaatatgtatcatatatattatacatattgtccaaaatatgatatatgatatatatatatcatacatattgtcctccctgattttcactatttccccaaccctttataaccctgggcctgtttcttattttcttggatatcggtcattaaattaaaccatcatcacttctaaaataattctgtgacaatcaattgataacaaagcatacatattgccctatgctacactgaccataaacacaagcaaaacaaggcagtgaagtacgatgagctaagtgaagtgcttcttctgggatgataaccccaacaatgcaccaatagacaaacatctacaaagcaatgttagtgaattcaaaaagatcatttgtgattcaaagaagttctggccatatttctcctattcattttcccctaggctggcaggctttacagggtttttgttgttgttgttgttgttgttgttgttttcctttcctccaaacccctagctcctatgcaagatgaaaatgttcctgaagtatacacacagcttctcttcaggcaaaacaacctctatctgaacacaacaggcaagacagttcataaacctgacaatggaccagtacttctgaaaaaaactctctaaaaagaatattcagaaatagtattcaatgtattaagcaattaaattttgtctcaactgggaggttccaggcacatggcagagatttgttacctcactgcttgtcagcatttcctgcctgcctttggcctatcatatgtcatatccgtggaggtggacaatttctccttggttttctgctcactaaaatatcctgtctttgggggtaccttatttcaacttacttttctgatatttcaccaaatgaaagaaactagtatccgttacaaatggatcatcattttgaaatgttggtatttatgagtatttgggttgtaataaaaattgacatacagtcattatttatttatcacataacaaataccttcattaaacgcagtcacataatcttcacagctctactgcctctcagatctgcaagtttatcatgtatattcaaatgactgcagtggcagcaacaaacaaaaaggacagattataaatctattttttatgtcccttaaaataatgtttaaatgacttgaagaataaagatttttttattggctttgctttttgcacagattctaaatctgaaaagaattattttcattagtttaaaatgtcctttctagaaaattccctcccttaaaatgtgtgttatactttatagcaggggtgtctaattttttggcttccctgggccacactggaagaataattgtcttgggccacacataaaatacactagcactaatgatagctaaaagaaaaaaaaattgcaaaaaaatctcataatgttttaagaatgtttacaaatttgcattgggccccattcaaagctgtcctgggccacatgcggcccgcaggccacaggttacacaaccttgctttacagcatttcaaaacattttcacaaacatcaccacagttgatcctcccaataatcttatgaggtggcatactccaaaaccaaaacatgctgagtcacatcagcagtgcagaagaaggataccaggagccagtggtttcttgcatgcctattatgtgcccaactgacttctgtgtatgtcctctcagtttctctcctggtggaatccctcaagcagcacagcagaattagaaacagaggaagtattcaattaagagcaactatattattattattatcactatcatcctcattaaagaaacatgggcccagagagtctaggaccaggcagtcaagcccatctcctaacgtcaggtctggcatttttttttttccattattccattcagaacttgtgataacataacattcaggcactttcctggtatatttatcctcacccaccctagaaatgactatccctgacttgaacatttatgtatttcaaccatgagctgatctcttcatctttataaggggcaagtctgggtctccagagaagccattaccgatgccatctctgcggacacttttgtaacacaacaaacaccactatatgagcagtaaaagggtgatcagcactcaccttctaaaggccactgaacagccagcaagcaagagcttccatcacctagactaaatctgacttggtgacccagagctgggaggctctgcacctccagatcaaggccaggcttccaagtacactgaaaaagacagctggttttcctaccatcaaagaagcagtatttaagaatttaacatttaaataccatcaggctttacccactttggagtaaaagcctggtttttttggcactaaaaacggctttgccaagttgttctggatttcattcaggccttgctaatgcattctgtcatatatcagtagaggcttgatgaggagctaacataatccttttaggaaagataactaatgttctacccagactacccagggtgtttctttaagattggatttgttttctgctaatccttaagattagctactgatgacctaatctaaaactgtaaaaagttcaaaagctcttttaaacttgaaaaactaataggtgatactctcctgacaattctgtaaggccctccacaataggccactaccagctttttcacactcattttgtaatcactctcttttgcaagatgttatgcctgcacggcatcactcctcaaagtggttctcaaacttagtagtgcatcagaatcccccggaatttgttaaaacatggcttgctgggccctaaccccagagtttctgattcagtaggtccgagaggagaccaagaatttgcatttctaactagtttccagcatcacactttgacacccctggcttttccagagctacctatttggaaatgctagtgcatccacctggaatgtcttcttctcagtaacctctactcaaatcatgtcaaaaccccaatgtggactaggggaagaccaggtctcctccctcttcccccactctcagctccacccacccttattccccaggactggtcaaatgaagggtcaggaagtccactaaggaaggaggagcagggagcgcatgctggaggaccctggtagtcccactttttcgtttttgcttccacaccaccagaagagcatgtaagagcacaaaccctcgcaactcggagctcctctcagccctagcccttcgctcctctctcagctttggggccacattctctctgggtccgcttcttgcagtgctggggtagggtttcaccagagtagtcaactccaagattcaggatctgggtttaccaaaaagaaggaaagatgtacaccatggtctaaccaggagtttctagagttctgtgcagagattcggggctaaatcatgagctaayaaggaagcatcattgctttccttcacaaaaacagatgcttctcacagcgttccagagaagaagagggattgctgggccaaggcaagatttggtgttcctgagtcccctattaaactgccaaatgaatgtcttcttaatagctgtgcactttgactcctaatactcgtcctcaaatcccagccacttcataaaacctttcccacctgtacttcygtccaaaggacaaacctttgctacctttcagttcacagcaaatactcatcaaatttttactgaatttaactgaaatatactcacagatcagagagaatacactgtgtgtatcattatcaaagcaaaaatcatagaaattatatatcaaaagcactttatatttggaacacttgcttttaatagcaaaagtcccctataaatgcacttcaggagaaagacattcagccacagaccagaatagcttttataatacttctgaacattttcaagcattctatctataatttccaggagcatatttacaatataatgcatatggccctctaaaaacttttaatagtacaaataaaattaaccttgggaaacaatgcaaaaaataaattaatgttcgtgataattttcttccttagatgcttggcgcctttttagcttatacaaccaaagtaatataaagtatataaataacaaagtatatgaatataaagtaatataaagtataaagtgaatttttctttaaaggaaacaaaaaaggcaactcaccttagaactagctgtaacatcacatcttcacaatgtaaaccaatgagagttctgaataatgccagagacaccacacaaagctgggaagcaagagacacacattctagttcagatgttggaacgataactctactccccacagatagtaaataaatcagaattacaaaatataatggcctttttttttttttagcagttttgataaaaagcatgctgctgccagggagaatgtgtattcaggatatcaattctcctataggatttgattagaaagccagtgtctggaattatgccactgtgcagaattatcttcctacaaaaatgtctgggctcatatttccaacttttaaagatccagacagataaacattctacctacaattctccaattctctctctctctctcacatacacacacacacacacacacacacacacacacaatctcctatttaggtaatttgttttcctgagttattttcaaatatgccattagttatttacaagacagggcttgcagaaaattgcatataacctagccaagtctcccttcagagttcttagcctcaagctcagctcctctcttggctttggggcattttccttggttccatttcccattgtgctgagggtgagataatgttcttttctaaaaagttctttaaaacacaagaattctatcaatcactgatttccaaaaagagaaggtaaactgccaaacaggggagatacccaaaggtgtattgtaaaatctttgtacccttttgagagtaagcttttaacaatcatactggcccatttaagtaattttaagctctcattctttgtacaggagaataaatgctagtctgtcttctaggcaggttgggcttaaaatctggccaatgaaatctacaacaatgctgtaaagaaagagctgtacttagcctaacycaaaacatctcttatcctcagggcaggtcatatacttgtcgttagctagaagcaacatactctgttcccattccaagtctttgcacacgtggttccattaaatgcaatgccttttcctgactcccccatgggctaactcctatctattctcaaagtcttagcttaggcatcgcctcccttaagaaacctttctgttctgtctcacaatattaccatccaacacttcctttccccagctcagttaggtttccttcttatccattgccacagtaacccctgcaaatcactgttaatttatcagattgcatagtaacccctaccgctcactgttaagggtgagcagcagggtgtatttatctttttattattgagttgtaggagttgtttattctgtgtacaagtatcttatcagatatatgatttgcaaaactttcctaccattctgtgaattgtcttttcaagttcctgctgttgtcccttgaaggcaaaagtttttaattttgataatttccaatttatcaattttttcatttgttgttgttcatgcttttggtgtcatatctaagaaaacactgtcaaggctacaaggatttactcctatgatttcttctaagagttttatagttttagctcttacatttaggtctttggtccattttgagttaatttttgtatatggcatgaggtgtggattcagccttattattttgcacatggatatccaattgtctcagcaccatttgttaaaaagactattctttctcccactgagtggtcttgaaatcttgttgaaaattaattgaccatggatatatgagtttatttctggattttcaattctgttccactggtctgtatgtctatcctgcaccacactgctttgattactgtagctttgtagaaagttttgaaaccaggtacggtgagtcctccaacttgtttcttcaagtttgttttgactattctgggtccactgcatttccatatgaattttagagtcagcttatctatttcaacaaataggccagataggagttttatagaaaagcattgaaactgtagatcgatttgtggagtattcctatattaacaatattaagtcttctggtctatgaacattgggtgttttcccttttatttaggtcttctttaatttaaacaatgttttatagtttttgcagcacaagttttgcacttcttttgtaaaaatttattcatattttattcttttgatgttattgtaaattgatttttgtacattaatcttgtatctgcaaccttactagactcattcattctaacaattttagtgcattccttagttttttacatacaagagcatgtcatctacaaatactgattattttacttttaatataaatgcatttatttcattttcttattgaattgccctggctagaactaagtaccatcttgaatagaattgaggagagaagatatcttaccttcttccttatcttagtgaaaaacattcttcactattaagtataatgttagctctgactttttcatagatgccctttatcagattgctaggaagttcccctctatttctaatttgttgagtatgctgttgataatcatgatgttttcctttatcttgatatgatgtattacattaattgattttcagactttaaaccagctttacaatcctagtttgatatatcccacttgatcatagtgtataatcctttctatttattctagatttcatttgctagtgttttattgagaactggggagcccatattcatagtagatgttagtgtagagttttcccgtggtgtctttgtttagttttggaatcagaataacactggcttcatagaatgagttgagatgtatttcctcctcttctaatttttgaaagagtctgtgaagaatctgtattaattattcattttttaaattgataaagaacacataaataaaatttaacgtcttaatgatttttaagcatacaaatcactagtggtaactatattcacattgttatgcaacagatctctaaaacatttacattttgcaaaactgaaactcagtaaccaccgaacaactccccattttccctaccacctagctcctggaaaccatcattttaccctctgtttctttaagtttgactattttagatcccttacatgagtggaatcctacagtttgtctttttgtgactggcttacttcacttcgcataataccctcaaagatcatccgtgttgtagcatatgacaagatttccttcttttttttaaggttgaataacattccattccattgtatatatataacatactctcttatccattcatccatcaatggacaatctaggttgcttcaacctcttggctattgtgaatgatgctgcaatgaacatgggtgtacaaatatctgttcaagatcgtgctttaaattcttttagatatatacccagaagtgggattgctggataatgtactaaacctatgtttaatttcttgggaaacctccatgctgttttccataatagctgcaccactttacattcccataaacaagacacaaaggttccagtatttccacattctcaccaacactaattttttctgttttttggatagtggccaccctaatgaatatgagataatatctcattgtggttttgatttgtacttctctaatcttttcatatattttttggtcctttgtaagtcttcttcatagaaatattcaagtactttgtttatttttaagttagattatttgggtttttggttggtggtgagttacagaactttttatatattctggatactaccccctatcagatatatgactcataaatattttctcccattctgtaggttgccctttcatcttgttgattatttcatttgatacgcctaagttgttaagtttgatgtactcccatctgtcttatttttccctacgcttctggtgtcatatccaagaaattattacaaaatccattgctatgaagttttcctccatgttttcttctaggagttttgtagtttcagatctcatgtttaggtctttgatacattttgagttaatttttttatacggtgtaaagtaagggttcaacttcattcttttgcatgtggatatccagttttaccattaccatttgttgatgaaaccgtcctttcctattgtgtagtcttggcacccttgtcaaagatcatttgaccataatacaacggttcatttctgtttcattctgtttcttattctgtttcattggtctttatgctagtcccacactgttttttattactatagctttgtaatatgttttaaggaaatgtgagctctccaactttttccttctttttcaatattatttcagctattcagagtcccttgagatttcatataaattttgggattttttttctatttctgcccaaaaaatgccattgggattttgttacaaattgcatggaatctgtagattgcttttgagtaatatggccattttaatgaaaataagtttttcaatccatgaacacggaatgtctttctatttgttcttctttcatttctttcaatgttttgtagttttcagtgcacaagtctttcacctcctcagttaagtttattcctaagtattttattctttttgatgctattataaagaactttttaaaatttccttttcgaattgttcatagttaatatatagaaattacttatgtgcgttgactttgtatcctgtaactttactgaactcgcttgttagttctaacagttttttggtgacatctttagggttttctatatatatgattatgttgtctacaaacagacacaatttaacttctttctatccaatttaaatgctttctatttctttctcttgcctaattgctctggctaggacctctaagtgggcatccttgccttgttcctgatttcagagaaaaagcttttagtctttcaccattgagtaagatgttagctgcgggcttttcatataaggcctttaatatgttgtagttgtttctttatatttctagtttgttgagtgcttttatcatgaaagggtgtggaatttgtcaagcgccttttctgtatcaattgagatgacgctgtgggttttgtccttcattctgttaatgtggtatattacactgactgactttcatatggtgaagtatcattgcattctaggaataagtcacacttggtcatgttatacaatccttaccatgtgctgtttaatgctttttgctagtattttgttaaagatttttgcatcaacagtcatcagggatactggcctctagttttcttgaagtatctttgtctagttttggtattagggcaacactggcctcataaaattagtttgaaaatgttcctggatcttcaggtttttaggagttcaaggaggactgatgttaattcttctttacatgtttggtagaccactagagtgaagccatctggtcctgggtttttctttaagatttttcaattatcattacagttttgatctccttacttgaggcaagtctgttcagatttttttttatttcttcatgattcagccttgataggctatatgtttctaagaatgtatctaggtcctctaggtcatccagtttgttggtgtataattgtttgtggtatgctcttttttatttctgtggcataaggtgtaatgtcgcctctctcatttctgattttagttatttgagtcatctctcttttttcttagttaatccagctaatggtcaatcaatattattgctgttgttttaaaaaaccaagtcttggtttcattggtttttctattctttatttcattgatttttgctctgatctttatcatttccttccttctgctaactttgagtttagttcattcttctttgtctagttcctgaagatgtatagttaggttgttgcttcaagattttcttttttaacctaagtgtttacagctataaaattccctcttagtactgctttcactgcacctcataagtttgggtatattgtgctttcattttcacttgtctccagatattttctaaattcccttgtgatttcttctttggcccaagaatgtgttgtttaatttgtatgtattcataattttttccacttttccttctgctatttatttctagtttcattccattgcagttagaaaaaaattatttgtgtgctttcaatttttgtaaatgtgttaaactttgttttgtgacctaacaagtggtctatcctggagaatgttccatgtgcccttgaggagaaccgtatatcctgccattgctgggtggagtatttggtatatgtctgtcaggtccaattggtttacagtgttgttcaaatcctgtttccttctttatcttctgtctgatatttttatccactatttaagtagggcattgaagtctcctactattattgtgcagctgtctatttccctctgtaattctgtcaatgtttgtttcatatatttggggactctgatgttacatgcatatatatatatacacatatatataatttttacatgcatgtattatatataatatttatatcttactagtgaattgacccttttatcattaatgtcattccttatctcgtgtccttttttgtctctttatcttaaagtctaatttttaaatataagtacaaccacctctgctttcttttagttaccatttgcataggatatatttttccatcttttgactttcagcttatgcatgttcttagatcgaaagtgagtgtcttttagacagtatatgcttggatcttctttttaatctatttagccagtttatatcttttgactggagtgtttaatccatccacatttaaaataattactgaggtggaaggacttactatttccattttgttgttttctgtgtgtcttacagctactttattcctcttttcccaataagcagacagaacataagaagtaatgtgaagcaagcaattcactcttttctttccctcacaaagtaaaagtcagtagttggagttttctctggatcttgccacactgtgttggggaggggacatggctagagcaggtaataatgccaccaattttcctgcacacttcaatatgtctcttcttggctttgtgctacaacctcttaactggtgttcttacaaagtttctgaagttcttacaaaagcagtttggtcataaatttttgttaagtgggtttctctgtgagggaataagggcctgggtcttcctattccaccattttgctgacatcactttttaactagtgcctaaatgtttgatagaattcaccagtgaggccatctgggtctgggcttttctttgtgagtagttcttttaatttctattttaatcttattttgatataaatttatttagatcttccatttcataagtttgtgtctttctagaatttgtctatttcatctaagtcatcctttggcatatagttgctcatggtcctaattgtttttatttctgtaaggttgatagtaatatcctcctctttcatttctcattttagtaatttgagacttccctctttttttctcagcctagctaaaggtttgtgaatcttgtcaaagaaccaactttttatttcacctattttctccatttttttaattttctatttcattaatttctgctctaatctttattgttttctttctgcctgctttgtttgctcttctttttccagtgtgttaaagtagaagcttaggttactgctttgagctctttcttctttttttaacatatgtgttcacaactatatatttccctttaaacaatgctttcactgtgtctcataagtctggatatattttgtcttcattctcatttatctcaaagtaaattctcattttccttgtgatttcttctttgacccactgattagaagtgtgtcaatttccatatacttgtgaatttcccaaatttctttctgtcaataattttttaatttccatccatcatgatcagagaacatgctttgcatgatttcaatcctcttaaattcactgaggcttgttatatggcctagcacatggtctgtcttggagaatattccatgtacatttgaggagaatgtgtattatgttgctgataagtgtagtgctaattgaatattttctctagtataacattttaattcctttaaaagatttttccactttttttagttattttcttagtggttgctctagggcttccagtatacattttaacttatcagaatttacttcaagtttatattaaattagctctagtgaaatatagaaatattactcctatataagtctattccctcttcccccctttgtgcaattattgttatatattatctctatatatgttgcaaaccgaatgatatatacattctcattcttttgcttttaaaacaagaattgcaattaactagagatagcctttggggaggagtatttttcaagttaatcagagcttcaaaatgaagaatgaccacccaaattcacaactttccaaacttccatttcaagaaaactcatggacaggaatatgatctctaacacccagacttgatgcactctggttccttggctttatctgtgcttaagcccacatgttcccttgcatcttgcccccacagaagtgcactctgctagttctacagaagaaagtgctaaaacagagaaatagcgaaagatgtcctaggaaaggcagtaagtgtcacctcttgacagaaggatccctgagaacaaaacgcattattccattcatctctacccaaatagaaagaaggtaatggccacaaaacaacaacaaccaaaaaagaaaaagaaaaaaaaaggagagcaaaagagaatattcataatttcattcccaaaaaaaaactctcctgaaatctgttctgagttgtaagttcccttcctctggcgctctccttacccgaaacggggtgttgattcgactcgtgagagtgtctaggatgtggacattctcgtgctggtgcaataggataaaacggaggaagatctcaagtagtgctggctcggagatgctacgcaggaaaaggtccagatatgcagtygtggtcatgacctcttccacagtcacctaggacaaacaacggagtgagcacaggtgagcatccttttgatgctgtgatacacgcctctcccgtggcccccagcctcaccacagtgacatcatcaaggcaagaacatgcctgcccacgaaaacacacttcagagctttattgaagcccataacctattcacattccacaatacctcatgctgtttccgccctttaattcaataaggaaaaagaaaggcataaagaatcaattcaagtgttctggtaactctaatcatcaaatgcagttcaaataccataaagattttagagtgtaatcaaaaatgaagaaaaaagataatggaaagtatttacatggttagtaaaggattaattagaaagcccggaataacttgtttctttattagtcattcagtaaacatttattgggacctgttatgtacgaggagctgaaaacataacattccttatgtccagaaagatgagctatgacaagcaaaatgataatataaattgcaaaggagcagtacagacacaaagtgctacagatgttccgatgtgtttctggagagctgcatgtcaaattttttataactgaataatacacataaaatgttatttacaaagtactataagaacttactgcttataaagtaactgcgacttttttataacaaattaatatatgctacctggtgtaattttctcatgcagtaaaatgtcaatttttcagtgaataagactctgaagagccaagtttttcaagaagccgaggatttgatgcttcaagtatcaaaattctaaccttaaacatttttattgggagtattttaagagctagcatatacatctttgtcctcctaagatgagaatataccatctcttgatgaatagaggtcattcccagggtcatcaattgccccgcagaagcataaagaaacagccacacctgaatgcgtgaaaaccaccagagaaatagttcaaactctcagattctaataccacacaccctagaaatcttagcaatccctccaccatgagtcaaatgcactcgattttaaacaaaacagatggcaatactttttgagtgattattttcccttttccattttttaaaatcttctttcattctcttcctttaaaagtgttagttgtcacattatcttacggttactgggccattccttttatattccattcctcttccccttttaattttcggcttttaaaatccacagattagtttagaaaccagatgtccagatctgctacataagtgtagatgagccctgagtggatgcatctgtgcataaaggcttggagctatctattttggcagtttaaattacttttaaaaagttattggtgctcagctttcttctggatagatgagcccaggtggataagatattaccaagtcagtgtgtctgttttctttatctaagcaaggcatgcttatccagtgcattagtatctaacgagaagtcattccacagtggtctgagtacatatcatagcgcaaatccccttcccctagctcggtgccaacaatgcaagttctcagwcattcaatacaccactatgtcatctgaccaactgtaaagagctctctgtggcccatatayagcaacagaaataggcaaccatcaaacatttaacaaataaattgcactgggaagagtgcttttcatggtctgcccctgcttctgaaacaaactacttccgtctttgtgtttcctgatgttttctagtcccatatrtgaagcactcctaatgctgccctgggatgcacactgtgtcttttctttattacctcaatgcaatgcacaaagcctggcacataaaatgtacttcttcctgagtgaatgatagccccaaagatctagtgatttatatttgccagaatttagtttaacttttaattatcctttatcctctacatgtgtcctgaaggtcccagaaagtagagacgttttttataaagatctctgtaataactgatgtcaccaatcatagctaagggggaaatgactcacaacaaccctacattagctcacatccacttcactactgcaaacttgggatcctttagcagaaacttaatcctaaatgatttaggcaaaaatctaattccccaacaaccttgatcactagaaaaaagttgcataatcattccaaacaggccatgtatgtagtttctgtaacacaatattttcagcttatctatggaacactgctgaactgacatgttatacagaattccagcctttgcaccaataatgtagcatcagcttttccccccttaagttacacatgaccttagtaagcttgaaagcacagcaatcaactccttagactacaagtctcagtctttgagggctaacatgaaaggagggcattaagtatctattgtttactactgttaggctggataaatgaaaatatttcatttctttttagaaatcaaagctgtcatttataagctaagaggatttaagaaagcacttggagggacagcatttatataacatgctataaatattaaaaacccaagtccattaagcattaagttgcctatttttataaacagatcatactcaccttaaacgaataaccaaaccaggaaaatctggctcccttcttccatcttttccttctaccatatcctcagagccttcaggagctttttataccagaaaatcttttcctgtcccattatcttactttcagaaacttcctctaatccccccaaatatgcaacctccttaacgaggatgagaccagagcctaagtgtgatcactggaaagctaacaataaaccaccagggaaaagatgctctgctgtgcagaatgtaaaacgaaatcttctgctaatgccccaaagaagtgttagcaagactggaaagtagcatcttcttcatgcacccattatggaggacaatcagctgctaatataagtaagacctctgtcttagagatgactatcaatatttatttaatttgttttataaagaattgcaggtagctacgaatttacatagaaatactaatagaaacagtaaatgacattctaccttactgccatatcatacgcaataataaagtttagggatactaaagcttaagaatgttatttcatactaaaggtgggccacaatgactgaaataacctaaagaaaactcagtgtccacaaatgagtaattatccctaagataagaacagttgttactctaaagaatgtctctgcttaagcactattatgtgtcagttccagaatagaggcctgactcaggtacttgactttactgctactgagtcccgtttagtccatccttggaaataaatctttctctgcccatcttctccacactcctatagcccttgtccgggtccttcttcatgccgagaatcttcaccaatcccttaagctggtgtttttgaaactatagtttgaaatccaaaagtgggtagtgaattcagtttattatttcattaatggtttagaccagattccaatagaaaatattagagtgccctgcatgtagtaagggcaagtcctgttttgtcaaacttgtgtatacatattttgttgaaaatatacataatgtgatacattaaatatatgtgctttgcttgcaaattcagtaaatatacatatatatgcaaacatacaaaatattatttctgactgtgagcagtagccaaaaacatctgaaaaacaccacaggagcacagttcacaatcatctacgccatgctttcacccaccagttctcatcgccagttccctatgctccaggctataacccgtcaaggtctggcctggaagaagtgcacacataggtgagatcagttttctgaacaggatggcaactgaatttacagtcaatctactcttttttgtcttaggctaagagctccaaaagtgtgtttttattttttattagaatttcaagcttcccagaaataggcaaaatggacagtgtgttttcttttaaaaaggaggtgggtgggaagggaggaggtgacaccatgcatcacattctacttctataaaaccaaagctctctaaaaaaaattaaagccagaaccaaacccagccatcatgcccacaactgcagaagcacattaacttattgcacggcgtatgagtgaaattgagcatatagacattctgacctttctgtaatcagctctagtcaggcgatcccatttgcatctaaattagtaccagaatcctccctgtaatggcaggtttatgtgtgtcctgaaaaatacatttccaagctgctaattgtttttttgtgatctagtcacattggaacaaacagatggatcctaccttctgtcactcaggcaggtggcaggcagtggggtcaggcaggcaggtggcaccctctccaaattagaagccacccttccttggcttttcctttgataacagaggaaaaaactagctaactgctggttcacctgggttatcagtgagtcatcagccccagtgggtccaaccagagtgaagctcccactgaaatcagcagaggggaaaagaatgacaaggctggatcacacgaaacaggagtgaaagggtcttaacagggaacacaggctacgagcctacccgctgctgccagagagagccaagccaacggacaggtgggaggcacatccacccacctgcagccaagggcagcagctggaaaggctccttgcagccatcttctcccctccaaggacaagaagcgccaagaagaacatttaagtacaaaagggaagacagacgccctggttctcagcaagcagctctactgtttcagccaaaaattcaggacagaaaatgttcaatgactccagatctgaaaatagtctgcagttgatgattccggctccctcccgtcggctcccctatgcctcccttctgctccccgacctctaggccacacgctacactgctagcaccgccagaggccagctggggaggtgaatggaggtgacagccaaagtcagcaagtttgctgatttattcctaaaatatttgaggaaggaggaaacagactggctacaatgaggatttcagtaacgtattttgaggaaagtgtattaaaataaaagccaatctctgccctttttctcccagcatttcttcaatggatctgtaatacattaaatatattagtataataaatttatgccttctgggagaaaagggaagcagtgaacaaatggcttttcagggtccttccaggccctgaatagtgaaacaccgctcatctccccaatggaatttggagctggggtctgtctgcctggggaaaaaccaggtacaagaggcacacgtgggaggcagtgccactcacaccacaggcagtggtggtgctcccaaggccatgtggcttcctcactgagcgctgcttccctggagctgctctcaatgcatttaactggcccaaatttgaggtacctgaataaacactgactacccgtccccgaagtacaaactttagtatctgggatttggttgattgtttttctgcatttcccattttgttctcagtgttcagattaccttgtcatgaatattgtcaaatgctatggatgctgctcctttggggttcctaacttttcctatacctcctcgcaatgggaacatatcaggaatggccctattcaacaaacatttatgcaggtgtgaaagctctgtactgggtgctggggacagaaagatgaacaaaacacagttctgagtgttttgctgttgtaagcagaaggcaaatgcattagtaaattctacttaagacctgaacttatgtgaggtctatatcagaagttatgttagccttgcagagaatacggttgccagctctgagcagaaaatgaggttttgaggaaaacagcgagaggaagataatagagagtggttttcagaaaaaggagaggctttggagctacacaaactagagttcaaatcctaacatttattacctttataacctttattgtgttatttaatctaagcctgtttcctcctctgcaaaatggggataatcaatatctttgaaagtattaagaggattaaagagaatgtgcataaatctcaacacatagaaaggactcagtaaaggatggctattatttcctgacttgggtcatcagtttaaaataagccaaattgaggcgaaaaaaaaaaaaaaaaaaaaaggaccaggaagtcagcgggagtgttggtggcaaaagaacaaaatttgcctgtctgtacatattttcgggggtggagggggaaaagtacaacctcccttatagaaaatgaacacctcatccatttccactccctccccattccctcccaggcattttatagaatcagaagattttgaggtggtcacaagggataggctacctcagccccaaagattcagtgtgtcctagaacaggctgtggttaagaggggacacagaaactccctaaaacatattttcatctgtatttgccaatgttagccaatctaaacctgattctaatcccacaggacaagctgaccaatactgacagaacaagaataaagctgtcattgccaataaaaatggtcctatgtccaatgggccgatgctgcaactagcgttggccaagttgaagggttactgctttcatcacatccaaagttatttttgcttgcttatcataaacctctctccttggaggattcagcaaatggctacgtctatagcctcctttcctatactatgtgtgcataacttgtaccctacagcttcattatgatataatttattagagtataatgcagtatatgatccattatacttgaacctcatctaataaagtttaactattgaatacccaaataacccataagaaaggtaattcatagcatggtcctgaggtaataattaacaaggaaatatgggggcattttggctcagaaacaaagatctgaggggtattccaaagatcacttggttcttctctttcttgtttactaattgttccacagagtccttttttgattcaaacttcttggttacaatttaagaaacaataaaaacaacatcactgaccagttactgagcacckagtatgcaactaaggactattcgaagcatattgtttcagttatttgagtcccaacaatcttatgagaactaactccagatggtccaagcagaaaagatacttactgaaggggtgtctcacagaatcaccagaaggctggagagacaggcttagaaagaaaaagaggtctggtgctgggctgccaaaacacagacacccacgacacccttctttcaaattcaaacagagattacacggcttctttcagcaacacagcttagtcgaggctcataatcttttgcatcagaagaaagtactcctcattataaagggagattccacctgctgtaatttaaattgtaccttaccstgccctcatcttaataagtggtgatggagaaatgctgtccccccaaaactcaactttcctattccagaattcttattaaacctctcagactccccttttctaggctgtcagttccccttctcagttttcataatacacatattcatcctttaagattgcaaacttactgcagaaatgactacaactgacctgcaacatgaattctcaaaggacctgatgcaccaccaggtactcagagtaatcaataaatgtgtcaagatggaaatcagcagccctgttactaataaaaacactggatttccaacagcccatgttggggatgccttccttagcagggtagttatattaattttacaatgcctgaacagcaggggaaattttccatttatagtgaataacatttcattgaaaatgcagagcgtaactcattccatgctcttcaattatggcaacctcgaaaagtgatccactggaaaaaaaaaaaaagaaatgcttcctcaggcttctccctatttatcttcctgattaataagacaatactactgaatgctgatgagactgactttaaaacccacagtagaggggaaatggtccatgggccagaaccccaaccagcagcttctctagaatgaagtatctgagaaccactgcaaaaacgcagcatctaatgcctgccattccattccacgcaacccccccaactcctcccccacgcaccccccaccaccccctgccacacacacacaatctccctgatgggttaaatgtatcattcggcagtggaatttaagtttagaccaattttcctagacactcaaactgtaacaaagtaacaaagcaagctctgatgataaaagacagatttcactcctagcttattttccatgagcaccggaaagacctcaatacaatgggaaggcagaaaacacacacatatctgcccaaacaaattcaataattgcagttattctgttcgtttctctctgttgtcccagacctgcacatcatctggcactggataatcacagaggagcatcccatcagaatgattcctgctttacctcacctgaaacgcaagtcagacacaaaaatgaggggacagcaagcyctcaaaaaaaacttagtgtgcggtgagagaaaatttagcaagaagataaaataaacagactaaactccttctctgttttccttgctttttggttttcttacttgaagaaaatcttgcagggcctttgttgctgataaatttttaatgttctcttaggatagtgcagggaaagaataaaagattcacaccaactttcagaccagatcttccctccactctctgcatttgtttccaagatgaataccacctggctgccttagataaggtggggttttgtgtggggttttttttttttattctcggtgtgtagggagggtgggaccctttctatcttttcataattctgatgcttaagaacccaatcgtttggtaccattatctccctcatgcacttgttgaagttaaaaaaaaaaaaagatatctaattttccatttcaaatcagagatcaatgtaagcttaatttataatgctaatttcctttcctacaatggaagagaagtaatggagaggtcagggatgaggagactctgtaggacctgtagatctactcagcctctgaaaatttactctgtgcctatttgtgataagacaatgcatacagttttgtcagctaacttctattattttaaaaatataaaaccaggcaagaagagctatactagaagaagggacagaatcaggtatgtcagggtcaaatgcttaagacgacctctaggctagttgagactggcctctgagccacagccagcccatatagggcatttctgcaaattagaaatagatctctttgggcaaagtagccccccaagcccacagtttggtaagcagatggcttggccagagaagaaggtgtcttctgccaattagagaagggtgcctcttcctgtgggtggacacagccccatgccaggacacaaagtctggcaaatggaacatgaacaccatctctcctatctgcaccctcagcaggctgcccttgtgcagtagacaacctgcccaactctatgcagtggccctgcaaagcttgtgcctttccaataattataataatagaaatttccagtttcccatcaatggaaatgaaattttgtttacatgtaagaagctttgaggtttatggcaggcactactaaatgtctccccaatatttattctccctctcttccttgggaataaaccctgactttataataaaaaaccacatttccctgcttcctttgcatctagatgttactatgtatgttttggctagtgagttgtaaatagaactggtgtgcagaatatgaaaggatcattaaagggagttttctgtaatgtaaagggagttttctgttatccacagctaaaccttaggcacaccgattcagtgttttctctgagtaagagaaataaaatatgctttgtaagtaaattgctatagatatctcaaccccagcaaacacttagaacagtgcctggcatatattgggtgcttaaaatatatatgttgaatgaaataattaacaaatgaatgttttagaactgaagaataccaactaacatttattcgcagcccatgataaagcagaaatgtaacatcaagtaacaagtaatctagtaacattctcccattcagtgttttcaaactttttaacactaagactcatcaaaataaaaatattttacaataatatctagtactcaccattactaagtgcaatgcactctgatattttctattttattcaactttaaattgtgacctaccaaattgacttcatgacttactcatgcaacaactcagtgtttgaaatctgtttaaaaatatacactagacagactaacttctctattagcttttctgttaactaaccaataagagacaacactaacatttaattttttaagttaaaaaccaaaaattgttttaatttactggaaaaaaacagtggcacaaatgaccaaaacactacttatattttgtttgctatttttgtacaatagttaaatatgatcatggatgtcttgagaagtctacaacataaagcaagtaataaggctgtcctggaaacccctccctgagagctggctagctgacctgtccttctcaggtatcagctcccgcttcctgttccactctggcacagggcagcatcctctctcagcactcatcaaagccaggccatcctttctccaatctggggttcataaccttctaccctgggtgcttaaggtacttgcattaaccgatctctttgctgatcagggaatcacaaatgtgctccctttctcagccaggattctctcagggtctccagatgataatttaaagaagagaaaaacatcatggagtagtagaaaatggtctgcaatgggaatgaatataagacacttgcattttaattcttagcatctggtgaccatgggcaagtgaagtaatattctggtgtcccaactgctacaaacggaaaacaagcctgatgtctcaggcctgcatactatgtaatctaccgcagtgagttgacatgtgtcaatgaagaaggtaaacgatgagatgtgaaggcttctgtgaaaagtgccttcctccacagattttggcgagcacataaagaagtgaggatctacaggataatagaaaagcactttggaacacttagaggaccctctaatgcaaacataaagctaccacacaaaccttgtaaacataatcaaatattaaagaactgaaagatcatctgcttcatatcctctattcctctcacaaatattaagctcacagactctgaacatttctttccaaatcatgagcctttgttttctctgctgtaaaatgatgatgaactagatgatctaccctctctgttacaaaagtctgtcccaaagcattctttgattccatgtcagtgacataaaactaagtgctaatctcaattctttgccctggtattttattttccagcataaccaacacatcactctattctaatatagtgatgagtgctagccactttcttttgacacatctatttaaccaactgcatatatattgagtgttttccagctgtacaatatactagcagctgaggatacacaaaagaagtataagaagcatttatccctcaaaaaacttccagcaattggcagataaagctcatttgatgaacaagtactaagcagtgcagtcctatgtgaaagttcattggcagtttggagataagagaagtcagcatatgcttcagtgcaaggcttctgcccacagcagtgcttgtattgagacctaacagatgaatacactttttcttttttttaagacagagtctctctctgtcacccaggctggagtgcagtggcgcaatctcagctcactgcaacctccacctcccggtttcaagtgattcttgtgcctcagcctcctgagtagctgggattacaggcacacgccaccatgcctggctaatttttgtatttttagtagagatggggtttcaccatgtcagccaggctggtcttgaactcctgacctcaagtgatccccccacctcagcctcccaaagtgctgggattacaggcatgagccaccgcgcctggcccagatgagtacactttggatgaacaggcaaggaatggaaaggataatccagcaggaacacgggagcaagaatgaactgttcagaggatgatgagggcactgatcagactttacatctgcatttgaacatcatgaagggaaggaaggctcataggcaggatggggccacatcaggagaggttttcaaaaccaggttaaggactctggattatcttctgcaggtcacagggaccatgataggttcttagtgatcggagtgacatttaaaccactccaatttgtttttttttttaagtatgaattactacttccaaattcgctagaacttagtttgaatttatgcagacatgatacagtaaaatgaagtctccaatcctcatgtgtcctcccacatgcagaatctcctagcagcgtacttctggcctctctctgactccccatataattcttctccaggaaaggaggagtaacttgtcattttgttgagcttgggattgagcctgtcccttcctctcttctcctgggagccaggcttctagcagaaagtacatattcaggggagggcacagaggcttacacctgtaatcacagcactttgggaggctgaggcgggcagagtacttgaggtcaggagttcaaggctagcctggcctacatggtgaaactccatccctactaaaaatacaaaaattagctgggtgtggtggcccgtgtctatagttccagctactagggaggctgaagcagaatgatcactggaacccaggagatggaggttgcagtgagccaatattgtgccactgcactccagcctgggcaacagagtgagactctgtctcaaaaaaagaaagtactggccaggcgtggtggctcatgcctgtaatcccagcactttgggaggctgaggtgggtggatcatgaggtcaggagattgagaccatcctggctaacacggtgaaaccccgcctccactaaaaatacaaaaaaaattagccaggtgtggtggcgggcacctgtagttccaggtactcggaaggttgaggcaggagaatggcgtgaacccgggaggcggagcttgcagtgagccgagatcgcaccactgcactccagcctgggtgacagagtgagactccgtctcaaaaaaaaaaaaaaaaaaaaaagaaagaaagaaagatatatttgtctctgctcttccccaccacaggttctataatgtgtctgggtgagtgtctgtctaattctagggttaaatattgggaatgtttgcccacaggagtaaaccctattctctggcaacagttttactggtaataaagatggtgttttgatcttccatctgcctcattttttgtatttctcaacttgtcacaactcagatggggaggagagccctttatacctcaattaaactatactgacttttctgaaactgcagtacagatcctcagccgtacaaattcagtttccactgattcacataaatgctttatactctagactgagtgcttcaatgaaatggaactgtattctagacactgccaactgatggcaaatgacagaagggacaccaagacaaactcatggcaacacacgggcaatcctaacagagaaccctgcacaggaaattctaaattgtagttgggtccctaccaccctcctgtcacccattctggcatctcctcttcccaacttcccaataatctaaactttccttttctgggtgtccaaactccacaccaaaccatgacaccaggtgtgacttatggccaaagtaatccccaaattatattttcccctctcctctactaaccccctgtccacactgtttacataaaaaatctgtattgtaagccctctgagttaaacagcaggatgtacacaaaatgagtaatcagtgaaatgaactattctagagagtgactgcattttaaaggattaatatgtgatgagactctaaattataacaggttgactatgtgaggatgaaaattctgagtatacccttcccagatgagcctctgtcaacacccccttgccatccccaccaaaggctaagtggacatacaggccattatcatcaattactaccactattaatagtagttccagaaatagctaccatttatgaagtaccagctctgtgccaaatattgtattagatgttttacatgtattatacaaattaattcaccttgatagagtaaaatggtaggtaggtattaggattctcatcttacagctaagaaaagtgaggctcaaacttttgccctagaagcacacagtaagtggcagaagccagacacaaacctaagtctacctgataataaatttcatggtttttacaagaattctaacaatttcctggcatttttgtcccctgccctctgaaaacacagcagaaatcctttgaaattgaatatctgtatcaaccatttggaacacgtcgtcaaagacactgtctcccattgtaagagttcaattgatggcgttttagaggattt

SEQ ID NO: 95316 - DNA, 26867 bp, Homo sapiens
tcatgcttcttcagaaggtgttttgattatttgcaaaaccgagtctcttatcaatcaaacagcaaaggtttttgctttttgaaatcttctaattatcactttggctaaatgaatgactattattttttcattggacctatgatcctattttgatcaagtatttgaaacctttaatgtatttgagaggcttctcacaattatatttcaaaatctaaaattaagtatttttgacctcaaactaactttgagatattccaaaaagctgctgaagcttccaaaagaaataataaacaggcttatttgatatgttcattatgtaaaaagattttcaaataagaaataatatttaaccttttcaaaattatatttgtattgtcatgttattagtatttgctccaaaattatatgagattcctaaaaattggatttgttttgttatatgttattagtcataattatgagtattatgttaaattgttgtaggtcataaaaggagaaaatgacctagttttcttgttaattccatctttaaccatggccatttttagtcttgctcacaattaatttttttatgctgatcctttttttctgaaagctctttgcaaatcctaaagtgttgtgtcttcaagaaagctcatggaaaggactgcaacaagtactcttggctgggcacagtggctcatgcctgtaatcccaacactttgggaggcagaggtgggtggatcacctgaggtcaggtgttcgagaccagcctgaccaacatagtgaaaccctgtctctgctaaaataaaaaaattaggccagcatggtggcaggtgcctgtaatctcagctactcaggaggctgaggcaggagaatcacttgaacccaggaggtggaggttgcagtgagccgagatcatgccattgcactccagcctggccaagagcaaaattccatctcaaaaacaaacaaacaaacaaacaaaaacaaaaaacaaacaaaacaaaaaacaagtactcttgaatacaagtttcttataattttaagattgtattatagcactgagtaaacaatttcagaactctaatttttaaaaagtcataaaattgttaactcaacatcaagcaaaacaactaattacattggactaatgtaattttaataacttttttgtttaaaatattgctgattctttttatgttttgctttacagagttaaggaaaatgtttgttctgttaagctttacagaaatgggtaaagtatacttttttgaacaaaattgaaacattcacttttctctctacctgattgatcctgaatttggaaactatgagtatttctattttatggcaaaatagttatttgaatcagttcattaagaatctgttcccttttgccacagaacacagttggagactctggttattttaccaaggctttgactgaaatgccatattttcagatgtgaccagacagctttaagaaactgaggttgatattatgaagcccataggagcttttggaaaaactggtctaatatcctaaatacacggttcacataatgggcttgtggtaagtaagaatgtcactttctgacatcccaggaacctcaagttaattgggggaccttgagaaaagagaaattcactaatttgtacaggtattactgacacaatctaagagcaaatccaatccttgacttggctttctagcctgaagaggtttctaaaagtttaatctgagattccttacgaaaagttccagcaaagtgaacttaaaaggagcctgtgttacaaattgatattcttactgcactttatgcaaataatcaggccaagtacaataagacgaaaacttaatatgcaaataaaatggctttgcttttatttatctttggtagaaatgggggactgaagagagaaaaatcatgtttcaggaaagaaaaaaaaactataattagattccagttcattgtttgttttttctttctttctcagatttttttatttgcctgtaatctaaactaaatcttaaattgttagtcctatcaaaatctgtctttgaatctccaggcaagcattttcaattttcctcctacatttctgacttggaatcactaaacgttaaaattccctttttcctaagactctacaagctgatactagctaacttggctttgaagaaaaatcactgcaacattttataaatggacaaactttgcacacaagctacaatccaggaaaatctgtcagattgctactgatattctcagctgtcctgcagactttagaagaaactagtttgtaaactactccaaagattaacctttgtttttcttccaattctgtaaaaaatggctcttactgtagatctttttgtctgcattatatatagagtcatagctttaagatcccatctacaaagccatctcctgatataagacaaaactggccttttcccagaagtgagaagactaattagactggccttttcccagaagtgagaagactggtttaatgagatcctttgccattcagctactaactcagtttttctctctacaactaccaactcaactttttgtgtatgaaacattagaaaagtttcaaacaggggaattactggggctcagaaaaggacacccaaaaatatggcactctgatatgctggttacttcaaattaaaggctcccggaagccagtagacactggaagaagttgttccccgaagttctcttacctgccttaagtccagatctgccaaagaagaaaacaattacctctggtcccttttctgtgttttcattaacttaactcatgttacaggaagaatgactaaagtttgtcaacacacctggacagacttttgtcacacatcattgtcttctatttcagtccaattcagtattttattttacttatttattttattttattttattttattttattttattttattttattttattttattttatttatttttgagacggagtcgccttctgtcgcacaggctggagtgcagtggcacaatctcggctcactgcaacctccacctccctggttcaagcgattctcctgcctcagcctcccgagtagctgtgattacaggcacataccaccatgcccagctaatttttttgttatttttagtagagacggggtttcaccttggccacactggtctcgagctcctgacctcaggcagtccacccgcctcagcctcccaaaatgctgggattacaggcgtgagccaccgcggctggcgcctggttattttttagtgatttttagacatctataaaaacaatatcagtactttgaggtctaagatgatgttttcttccttaagggagtatttaattttgttttattttggcaactaagggccttaattagcaaaatctgaatcacgttaattccctttcagagatatcatgaaagtttcctcataagccaattataaaagtaaaattagttactacaagcaaagtttttagaaaattcctgactctagtaagtgcccagaaaaatttgaatgtaattgatttgcatgaaaaatgctgtaaaacataataacataaacgttaatggtgaattcagtgatgttggtatttccatgacttttttcattctccttacatgctgtaaattattttttaaatgaaaattcttttattaaaaaaagctacattttataaattagtataacataatggtaaagagaaatgtgaatgtattagaaaagatgctccattgagaggagacacatttgtatttatcatgaccttgaatgaaggtccctctgcagatcctatcataatagtcctcgtgtcagtgaagtcccctgtgaaactggataacaggattttaaggtagagatgttcctcaggcagatggaaatgtagtctatagctgtgaagataagtcaggcaatgaaataattatagagaaaaaataatgtaagctatcaaagacagatgtatacaagggagacagagtcacataaagtctcagatgtaggaggccatagagcaaaacgctgagttctggctttcaggagttttctaacataacgacctgatcaccagttaaaagctaaggagaaagatgaagaatcagtatgagatcataaaattatgatgctcttctaaaaatatgcgaaatgaggtttttagggaggtgtaggtatggctgaagaaaatcaaggtgaatgaagacaagatcaattgagaatgtagtttcagaaatagcaaagaagccaaagtttgaggaagttaagtggctagggataaaattgaggcactaaagcattattggttctgcagtcaagggtaggatagattgttttttttttttttgagacggagtctcactctgctgcccaggctggagtgcaatggtgcaatcttggctcactgcaacctctgcctctcgagctcaagcaattctcctgcctcagcctcccgagtagctgggattacaggcacatgccaccatgcccagctaatttttgtattttcaatagagactgggtttcaccatgttgcccaggctggtcttcaactcctgacctcaagtgatccgccctcctcagcttcccaaagtgctgggattacaggcgtgagccaccacaccggggggtaggatagatttagtgagatgactggataaacggaatcaagaaaaagctttgtcaaaaacttatgcttcttaaaaacttaatcctgggacagaatcatctaaaacgttgttccatgtcttcactttgactcacccataaaaacttcaagtacaaagaatgaaaaataaccacatattttctaatgctcaatattttatttgtagtgttgttttctatatagatatgataggtcttcatgattttttgtttgttttccttgaactgattcccaaagtattagcctcatgaatcatgtagtcataagaaacacagtcattgtattctctttgctgtataattttggtttcagttttccttacatttcctattcaaggaacattttcctgtaaaatgacaggttgaagaaaacagccataatttagtagagaatagcgcgagagctattctagactgtaacgaaagccatatgctatcacaatttaatttatttcaagtactaataagctgatgacaaaacagcgatgtcttttagtttactcacacgaactatttctcttttctccttttgatcatctagaggaacgggcaacttggtttcttctttagcttccttgttctcattaagattgaacaatgcctctaaagtgaaccacagacttgcatgcaagctgaaaacctttaccaaatgcagtcttaatttgtactttgagaaaaacattttcaaggtattttatccttttctccaacttttgacatattacaaagtacccaaatatgccagactgttgcctcatcagccccccgcagtcaggtacagttagatgcaaggcaatcttcctaaaagttacttattagagatgtgagaagggcaaatgctatcattggaaaaactgacaaaagtcccaataggaaaaataaggaagtggagagttactatgtttctaatttttcatgtgcttctatttttttcctacttcagagccattgactaatagttgagtataacacaggttgtgtttccgggctgctgaaacatgacactaatattttcaaagaactgtggaagcctaaaaggaagccaatgagaaataactaaatgagagtttaggactgcagccttcattttcattcaaagatttaaaagtttccataaagtaaaatgttcttctccggccacctgttttcatagttctgtgttttccttcaggcctttctggcttcctatatggcagtaagaaaatgatgtgcttaatgattacaaatttcatatggaatacgaactttcagtttgtacatatgatgcacagagatgcttttgtggttttaytggttttcatattacaaacaaagaaactagaaaatgaaaccattccaaaagtggaagtaatttctcactgcccctgtgataaaytgtggtcactggctgtggcagcaactattataagatgctctgaaaactcttcagacactgaggggcaccagaggagcagactacaagaatggcacacrctatggaaaactcctggacaatcagtaaagagtaccatattgatgaagaagtgggctttgctctgccaaatccacaggtaagagaaggcagtaaaatgtgggaaaatgcattcttcttctcattccttacctggccaagttaacttctactgaacaactgtggttcagtaacttctagtaaacaaacacataaagctgtgtaaaaattagagagctgtaataactgcatctcacttaatttgtcttacattttctccctagaaatggagtcatctatgcatttcttacttacctaacatggatacggagagtggtgagaaaggaaactatagaaagtgtatcagctttacataagaattatatagtaaaatacaaacaatgaggttattacagttgtattttgagaaaaggtgttttgcaaaagccagagttttaaatgagccatgagtcaaacagaaatccctttctcttagggatataacttaaattatgcaaaacatgtgtttctaatttgatggggtttatgagattgcacatcaagcaccttccatgttatattatcattgcttgttatttactgagcgtaagattcaagtgagagtctgaactaccttttttcttgtttgcaagtcttacctataaagtacaaggtatgtggaaaaaaggtttgccttaaaaactacattttctagtctgtcttctaacgaatgctatgtaaaccaatttatcatcaatattttaattatcaaatacagcatttttctaagcaatttacaaattaaccctttccattctcatagccatcccaaaagttatgtatgttatttatttattattattattattattttgagatggagtctcgctctgtcacctgggctggagtgcagtggcacgatctcagctcactgcaacctctgcctcctaggttcaagcgattctcctgcctcagcctcccaagtagctgggattataggcacctgccaccacacccagctacttttttgtatttttagtagagacggggtttcaccatgttggccaggctggtctcgaactcctgacctcaggtgatccaccgatcttggcctcccaaagtgctaggattacaggcgtgagccactgcacccggccagaaacgtatgttattatcctcatgttcctaatgagaagtataaggcatgcagaatgtaattatcaaactatgtagctagcaagtgccagaggccagtatgagcctaagcagcctgtctccagagtctatgatcttaaaaccattattccacactgcctctcttaagaagggataataagacattgcttattttctttctttcaatcttcagtttaacaaggtacatgggattccaggagaagatttctatgaacatgttataataattctgtagacgagtgtatttttgtttgtagctcaaacagttacagtccacatactagagagcacctttaaacacagcaaatgtttagtcagagatttcaacctaactgtgcttagaaatgaaatcctgtaaacaatttggtgatactggcaaatttaaagcatctacctccttccaatctaattttcctcttcagattgttaattaaagaaaatgaaaagtatactttaattttattgccaaaagcactagtttgctttattcatgcaaaacaataatactcaaacttgctatttgcccgcagatctacaaaaatgctgggactggatgatttcaaggatgtacttatcaatggtacaataaaaccatctttttcagaaactactaaactttgtatcatgggttttgtttctcagatattcgattctccttaaaaatgcaacaactgtgataattatgaatacctgtagaacagattccaaggagtaaagcaaaaccccaaaagaaaacaaacgaaactcttccttagctacttaaaaaaaagattctcggctggggacgggtggctcacgcctgtaatcccagcactttgggagacggaggcgggtggatcatgaggtcaggagttcgagaccagcctggccaatgtggtgaaaccccgtctctactaaaaaaatacaaaaattcgcagggcatagtggcatacacctgtaatcctcgctactcaggaggctgaggcaggagaatygcttgaacctgggagtcggaggttgcagtgagctgagatcacgccaccgcactccagcctgggtgacagagcgagactccatctcaggaaataataataataatagtaattctgacaaggtgcagtggcttacacctgtaatcccagcactttgggaggctaaggtgggtggatcacttgaggtcaggagtttgagaccagcctggccaacatggtgaaacccctgactctactaaaaatgcaaaaaaaaattacccagcatgttggtgtgcccgtagtcccagctacttgagaggctaagacaggagaattgtttgaacctgggaggcggaggttacagtgaactgagattgcgccactgcactccagcctgggtgacagagtgaggccctgtctgaaaacaataacaataataacaattctgctagctgagatgctgcagaagctagattcactgtcccggaaacatgaaaaaaaattattggttacttttatttcttcactgaagatctttcctagaaattatgaaccaaaaaatgtctgttttatctctcataatctatctgcttcttagtccaaaggaaaataatatgttttctgattccatatagatagatacaaggcacaatctctaatctagcagaatttgaatgatcctcagtatgattcatttttaatttatattataccatttagggatcctctgaaccagagcatattactgattaaattttatacttgttgaaagtgctgtcaaataaaatgatcatcattgtgcagaacaaaaaagtattctgttatttggagaaaatcacaacaaccaaaaaaataagatgtactagatggtgaaacatagaataaaaacaacaaaaatacatttattacatttcttttgaaagttggaaacttcacaataaactcgatatacaaaaatcgttatgtaaactgtataagcctgggtttccttatttatgatacagagataacttcttgggccattacaataattaaatatgtatcttttatatatatgaaattatcgagcagagtgcctagtccactattgacatttaaaacatctcattttccttccattcaaagaacttaaaatctagccaagataaaccaaagtaggccaggcgcagtggctcatgcctgtaatcccagcactttgggaggccgaggcaggcagatcacctgaggttaggaggtcgagaccaacttggccaacatggcaaaaccccatctctactaaaaatacaaaaattagccaggcatggtggctcatgcctgtaatcccagctacttgggaggctgaggcaggagaattgcttgaacccaggagacagaagttgtagtgagccaagattgcgccactgcactccagcctgggcaacagagtgagactccaattcaaaaaagaaaagaaaagaaaaaccaaagcagcagataataattgtttaacaatttgaaaaggcataatccatagaatttatagtggaggagattggtttcaaatagagtagtcaggaggattttagtgaaacctttgaggtgaactttgaaaagctgcaaatggcagtgtttgaagagagaggaagaggtggaacacagagagggtcttcagccctgcgtgtgcagatgacaagacagaggctggtgtttccagacaggtaagccatatgccagggcaacattgcacagaatggatgtgaaggcaaggcatactatcagtgggaagccaaatctacaataactgctactactaaataaagatcttttttttttttcaaggaaaatctacctgatttttataatgactggatgttcattgctaaacatctgcctgatctcatagagtctggccagcttcgagaaagagttgagaaggtttgacatatgtattacatttgtcttcttgtatagcttcttaacattgttaacttggttttgaagcataaaacattactgagattgatttgagtcaattgctccatttgttttcagttaaacatgctcagcattgatcatctcacagaccacaagtcacagcrccttgcacgtctagttctgggatgcatcaccatggcatatgtgtggggcaaaggtcatggagatgtccgtaaggtttggagattttctcagatttcttatgctatgtgacagattttcatctaatttacatttaactttccaaaaattttctaaaagcattataactgcatcatgcaaagtttagataacaygacaaaatgataaagaaaatatgccctggcttgacatgtccactgttatcattattatatttttagtcttttacttcatttttcatcctgtattttatctggcaaccctaattacataaaactaatacagactgcaatatctaacctttaaaacacacatgggcctcccagcactttgagaggccaaggccggaggatcacctgaggtcaggagttcaagaccaacttggctaacatagtgaaaccccatctctactaaaaatacaaaaaatagccaggcatggtggcaggtgcctataatcccagctactcgggaggctgaggtgggagaatcacttgaacctgggaggcagaggttgcagtgagccgagatcctgccactgcgctccagcctgggggacaggagcaagactccatctcaaaaaaaaaaaaaaaaaaaaaaacaacaacaacaacaacaaaaaacctaactactgtattttaatcaggtcttgccaagaaatattgctgttccttactgccaactctccaaraaactggaactgcctcctattttggtttatgcagactgtgtcttggcaaactggaagaaaaaggatcctaataagtatgtaaacagtgataacaacaggaatttttggagtgtgtgccgattaaataaaacaggggttgttcattggcttaattttgggcagcrcagctttcctctcagctgggtatggttcctctcagttcctcggctgggtacggtttcttggactgctgtgtctaccactacaaatgtacacatatgtgacaggtgtatagttaacacagtaaaatgcacaaatcttaagtgttcagcttgaatttaactattatatacatacatacacccaccattctcagtaagatacagaattttttatcacctcagaaaatttctttgtgcctctttcaattccctttcctgccacagacaaatatatttttatttgccttatcaaaaattagatgatttttgttattgggtttcatatcaatgaaaccacagagtatagactcttgtgtctggcttcttttgatgagcatgtctttgagattctattaatttaattttttagcagccaattgtggttaagagtcaacacatctttaattacaggcagcaatgactggtttctcagagcagtctgctcaggatataggtgatttttacccatttaggcataagatctgctacaataaaggaaagggagaaccaaagcccacgtctctgggtgtgtgcctgtagaaaaatattctgcaaatgggaatatcataaaatgaaaggattcaatctagaaagtttcttcttattaaaaattagtttttttaaaaaaaaattcaccgggaatggtggcgtatgtctgtggtcccagctacacagggagttaaggcaggaggatcacttcagcccaagaagttgaggctgcagtgagccatgttcgtgccactgcacaccagcctgggtgacagaatgagaccctgtctcaaaaaaataaaaataaaacaactagttttgactgtccatgtgtgttccttgcatatttaattatttcattcatttgtaagttattaagttaaatgtaatgcctactgaagaaacattttaataagctttttctttttacctatgtcttacctctgatagtagcattcaattaaatagcaacaactcatcattatttgatgttaaattggttttctttctctcttccaattggtccattgcttcatggctgctttcataaggcccctgacttatgagtaagtatctgattcttgtttgattctaagaattatttgttacttatagttgaatgtaggtttatcaatagactccaaatgcatttttaaatgattaattgaattcagccaaaaaataatttaagtgactatttagagaacaaataatctcagtctttaattgtatctatgattgtgttacaactatgtctatctgatattatagctatagatatatacaagaatactactcaaatacatctgtaggaaattaatatgcaaacatacaaaatgcacatacatctgtgtatctatgatttaataactcccatgtccataactagttaccggtgtcaataagtaaccatataccaacttgttctttttgacccaatccttactacttttgacctataatatatactaaacataggctaagagatggaaaacctgggctgggtgcatggctcacgcctgtaatccctgcactttgggatgccgaggcaggtggatcacctgaggtcaggagttcaagaccagcctgggcaacatggtgaaacctcgtctctactaaaaatacaaaaaattagccgggcctggtggcgggcgcctgtaatctcagctactcaggaggctgaggcaggagaatcaattgaacccaggaggtggaggttgcagtgagcggaaatcacgccactgcattccagcctgggtgacagaacaagactccatctcaaaaaaaaaaaaaagatggaaaaactaaggtaaatatcatcagtataaacccaccttggtgaagctagactaatgaagaggaaaggcagtatatgaaaattatgtaaattgcgatatgataaagataaggcataagaagttaaagtattgggatccctaaccaaataaaaggagtgatgggggaacccttgaagcaagttatttgaggaattagctagaggaaaaaggtaagagtattcatagcggaagaaacagcaaaagtgagaccttgaagtgacaaacatcttggtgcgttatcaaagctgaaggatggctaatgtcactgataataagtgataaaaataacagtgtgagaaaaagattaatttttttttttaaagatcgctgggaaaagtgggtgaatcacctgaggtcaggcattcgagaccagcctggccaacatagtgaaaaccctcctcttctgaaaatgcaaaaattagcggggcatggtggcacatgcctgtaatctcagctactcgggagactgaagcaggagaatagcttgaacccaggaggcagatgtggcagtgagacgagattgtgccattgcactccagcctgggcgacagagtaagaccccatctcaaaaaattaaaataaaaataaataaagattatgtaggattttattagctatgataaggagttaaaacagtatcttaagggagaaactggaaggtttttaaaaacgaggatgacatcagcagtcagtctcactttacagatgagaacaccaaggcagacggtgtcatatcttgctcaaggtcacacagcaagtaagttgcagagatggtctggcttcagataccatgaatttaaccaccacaaaactcatagatatacagatagtaagactatgtttgcaccaacgcccaaacttcaattaaaaagaaaaacagggtctaatcagttatttgaatttcgcagtcaattcctttgtaaagcatataaaccactgagaaattgaattaggctcacaaattaaaatgtgaatatgaatataattatttaaacaaaagactacctcttaaaactctacctcgcagatatcctgtgagaagttgacgggataatagaaacagaactagtttgggaatttctaattctgagtgttttttgttgttgttgttttgttttgtttatttgttttctgagacgagtctcgctcttgtcgcccaggctggagtgcaatggagtgatcttggctcactgcaacctccgcctcctgtgttcaagtgattctcctgcctcagcctcccgagtagctgggattacaggcgcccatcaccatgcccacctaatttttgtattcttagtagagacggggtttcaccacattggccaggctggtctcaaactcctgacctcaggtgatccacccgccttggcctcctaaagtgccggaattacagatacagatgtgaactaccatgcccggccctagttctgagttctaatatgaaactttaggtctcagtttaacctacttactattaattatatgatcttggacaatgggcctaaaaaaggagtcttaatattcccaactacataatggagatagtaaggcctgccacacctctctcataaaattatgttgaaamtaaaatagcataaataaaaatgtcaaaaaatatcccataatttttgctaaacttcttgccttccttatccaatttcctcaggaacatggacgttttgttctcatttcgtgatggagactgcagtaaaggattcttcctggtctctctattggtggaaatagcagctgcttctgcaatcaaagtacgtctatcctcacttcaaaatttatatgtcaatttacgtaagcagagcaatcacttcggagcctaaactatactaagcatgagttaactttatccttaacaagtacaacatgggatcatttaattgggggtaaaggatcaattatttatttttgtgtattacctaaaatataaaatctcagagccatatacttaaaatccaacttgaaacctctgtaggagataaaaattttcaataaaatctggctttggaactatgatacagtgtcataaattcaatagttttgattatcaaaaatagaaatgaaacatatacaactatataaatatctttaaattaaatgctatgtgaataaaaacaaatccaagcttctataaatgtaaggaaattagtcaaatagagtgtccagcccaggaaagaaatgtaaaaatcccaaatttaatttatggattaagacgggggaatttggcagggcacagtggctcacacctgtaatcccagcactttgggaggctgaagtgggcggatcacttgaagtcaggagttcgagaccagcctggccaasatggcraaaccccgtctctactaaaaatataaaaattagccgggcatggtggtgggcacctgtagtcccagctactcaggaggctgaggcaggagaatggcgtgaacccgggaggcagagcttgcagtgagctgagatcgcgccactgcaccccagcctggacaactgagcgagactccgtctcaaaaaaaaaaaaaaaaagaaagaaagaaaaccttaaatgtttgtgttttgtttgtttgttttaggtaattcctactgtattcaaggcaatgcaaatgcaagaacgggacactttgctaaaggcgctgttggaaatagcttcttgcttggagaaagcccttcaagtgtttcaccaaatccacggcaagtgttgtgtgcagtgcaatagtctaggctgacaagtcaaatgttccaggtgtagaatagttgaaaaaagggaagcaaaaagcaactatcacttagtatgttttcactttaggtattttatcttactaaaccattccactttctatgtggtaggtttcattatctccattttataagtaaagtcatctaaattcagaaagacagggtaaatgacttcagattccacaggcggtgaagccagagttccaagctgggtctatttaacactaaggaacttccttgcctcccgctaaaaaccttagagaaactttccacatgggagggtggttttaagtcccgaaaaaaaaaaaatagcttctgcttgataagaactccttcctaattctgtttttttacaaattaagaaacaatacagaaaagtcattgaggtcaaaagttgttgcaaaattaacagctaaaaaactacccacaaaaaaacacacaaaaaagtgcataagcagtaatttgcaataggaaatctgccctactgaacagactcaacaaatacttgattgtttctctctgggttttgagttattgctgtttagtccttggcaagaagctagattttcaaatcaagtagggtaggagactgagtgcggtggctcatatgtgtagtttccagctacttgggaggctgaggtgggaagattgcttgagcccaggagttggggctgcagtgagctatgatcaatacattccagcctgagtgatgaagtgagaccctgtctccaaacaatttttaaaaattttaaaaatagagagggaaatctagtttctagggttttgttttggtttgttttgatttgtttttttttgtctttggtttgtttctttatgtaaacagtttacttgttacgtcagtaagcacgtaaagtaaagtagtgctaaataaatagatacagtttaatgggcttcctggaagagggtaggaaagtgaatgcttatctgcaggggctttgtttagcatagactgacctaatgccttttcctgcagcctgtgccaaaatccattatcagttgtacacaacaccttgatttccctgtatacctctgatgctgcttaattaaacatattccatctttttacagatcatgtgaacccaaaagcatttttcagtgttcttcgcatatatttgtctgggtatgtagtcttatgtttgaatttgtttgctctcacttaacaaagaacaccaccaaattctcttggttggtccctratatccattgggtttggctaacaatttacatccaaaaatkcacatggtagaaaaatactagactgttctgttatcacttggccaggaatgtactggagtgggggacaggaaagctagttattttaaaaagagtggtctgtgctagtacaaaggtaagattccattcctagaatagttatgccaaatctgctcaggattatattatttactattctsatgcttgaaaatgagcaggggcaagggggtatgaaaaaaggatcatgaaatccatctcttgtcaccttctrttcagcactagtgcaagatttggtacctgaaaattagcaattaacctaaagaatgatttttctttttttctttctttcctctgayagctggaaaggcaacccccagctatcagacggtctggtgtatgaagggttctgggaagacccaaaggagtttgcagggggcagtgcaggccaaagcagcgtctttcagtgctttgacgtcctgctgggcatccagcagactgctggtggaggtgagtggaaaataacaagaaataattatctcttatgtgaatacaatagtatttggatatctacaaagcaccttcccatcagcatcttatctgagcttatctgatagttttagcagaatcaggcaagtagggatttggttgccatgatcccattttaaaaatgaagatgcagaaacttaatgagagtcagtgacaggttccttgtgaaccagctagaaagtggcagagctggccaggtgcggtgactcaagcctgtaatcctagcacttcgggagacctaggcaggtggatcacctgaggtcaggagtttgagaccagcctgaccaacatggtgaaacccggtctctactaaaaatacaaaaactagctgagtgtggtggtgggtgcctctaatcccagctactcgggagactgaggcaggagaatcgcctgaaccccacaggcagaggttgcagtgagccaagatcgtgctactgtactccagcctgggcaaaagagcaaaactccatctcaaaataaaaataaaaaataaaargccaggtgcagtcgctcacgcctgtaatcctagcactttgggaggccgaggcgggcrgatcacaagatcaggagatcgagaccatcctggctaacacggtgaaaccctgtctctactaaaaatacaaaaaagtagctgggcatggtggcgggtgcctgtagtcccagctactcgggagactgaggcaggagaatggcgtgaacccaggaggcggagcttgcagtgaaccgagatggcgccactgcactccagcctaggcaagagtgcgagactccatctcaaaaaaaattaataaataaaaacaaaaagaaaaataaaataaaataaattggcagagctttcctcacacccaagttccatcttgaaatctgaacatgtctataaagactggttgactccggtgaagccaatatcacatgctctgaaaatgtatgatcagactcagaaagagacactcacctgcaaatgagacagggctgttagtggggagataaagacctcagtgacaagcagagtctgggccctgctcttgttcagctgtcccgtggccccagccacccagagcaatgcctgcaccaaagtttaaaggtgagccacattcattgtatgccttctaggggcttagctggaggggaggaataagctccaagaagaacttctttttaattttctctgttttgttaaacttctgtttaacagtcaaaggggaaagcatcgggctgggtaaaaacatgagtttttcttaatttgagcactcatttttaaaatttttttatcatatttaacttttttattttagattcaggggatacatgtgcaggcttattacacaggtataatgggtgatgctgatgtttgggcttctaatgatcccctcacccaagtatagaacatagtgcccaataggtagtttttcaacctttgctttccttcctccctccctcccctatttgaaatcctcactgtctattgttcctatctttgtgtccatgtgtactcaatatttaactcccacttatcggtgagaacatgtggtatttggttttctgtttctgcattatttcacttaggctaacttaagctaatggcctccagctgcatccatgttgctgtgaagcgcttgatttcattctttttcatggctgtgtagtattccatggtgtacatgtaccacattttctttgtcccatctaccattgatgggcacctgggttcattccatgtctttgctgttgttgaacactcatttaaacacaatctcttaaactctcttaagaatcagtcataatctgtcaaatgcagattatatatgccccttgtctataccatcagcttcttacagtagaaaagagagaaagaaagtgcaaacaaaggccaggcgcggtggctcatgcctgtaatcccagcactttgggaggctgaggcaggtggatcatctgaggtcaggagttcgagaccagcctgaccaacatggagaaaccctgtctctactaaaaatacaaaattagccgggcatggtggcgcatgcctgaaatcccagctactccggaggctgaggcaggagaattgcttgagcccgggaggcacaggttgcggcgagccgagatcgtgccactgcactccagcctggccgacagagcgagactctgtctcaaaaaaaaaaaaaaaaagcgcaaacaaaaatacttattgtgagaaaatgagtttagctcattcagttttcaaaattaataatattttacaataattacgattgctagtagcaagactaatagccaaacattagccttcaaatagaatgaccttgacctcagtgaatgctatattggtgatctcctgcccactctgacctcactctgcctttctctcctggattggggaatgctgtgacctccrtatttcctctttctctttttcctataggacatgctgctcagttcctccaggacatgagaagatatatgccaccagctcacaggaacttcctgtgctcattagagtcaaatccctcagtccgtgagtttgtcctttcaaaaggtgatgctggcctgcgggaagcttatgacgcctgtgtgaaagctctggtctccctgaggagctaccatctgcaaatcgtgactaagtacatcctgattcctgcaagccagcagccaaaggagaataagacctctgaagacccttcaaaactggaagccaaaggaactggaggcactgatttaatgaatttcctgaagactgtaagaagtacaactgagaaatcccttttgaaggaaggttaatgtaacccaacaagagcacattttatcatagcagagacatctgtatgcattcctgtcattacccattgtaacagagccacaaactaatactatgcaatgttttaccaataatgcaatacaaaagacctcaaaatacctgtgcatttcttgtaggaaaacaacaaaaggtaattatgtgtaattatactagaagttttgtaatctgtatcttatcattggaataaaatgacattcaataaataaaaatgcataagatatattctgtcggctgggcgcggtggctcacgcctgtaatcccagcactttgggaggccgaggcgggcggatcacaaggtcaggagatcgagaccatcttggctaacacggtgaaaccccgtctctactaaaaatacaaaaaattagccgggcgcggtggcgggcacctgtagtcccagctactcgggaggctgaggcaggagaatggcgtgaacctgggaggcggagcttgcagtgagccaagattgtgccactgcaatccggcctgggctaaagagcgggactccgtctcaaaaaaaaaaaaaaaaagatatattctgtcataataaataaaaatgcataagatataataaatgttgcttcatttataaccataataaaatatttatttagatgagacctactataaactgctttcagcagggctaatagactcctatactttccctatgttaatgtgagactttttcataattacctgtcaacttgtctatattcttattacatgataagcttcttgatgccagggacactctgtattgtttaccagatttatacatcccagcttttttttgtttgtttgtttttgagacagggtctcactctgtcacccaggctggagtgcagtggcatgatctcagctcattgcagccctgacctcccagacctaagtgatcctcctacctcagccccctaagtagctaagactacagctgtgcaccaacatgctcagccaatttttgtattttttgtagagacagggtcttgctatgttgcccaggctggtcttgaactcctgagctcaagttatgtctgtatcttatcattggaatatatgataatcccagcactttggaaggccaaagtgctgggattatagcatccctcccaaagtgctgggatgcagccaggtgtggtggctcatgcctgtaatcccatgtgattatgaaagatatgatttggcctcccaacgtgctgggattacaggtgtgagccaccgcacccagctgcatcccagcttttagaagacacttagcaaatttatgttcaataaatacataaaagaataaatgaatgtatgataaattaacctgggctaaagagaagattcacctttgaaataacacttctcctgagagatccagattattgggcactcacattctggcatgtatatatttaataatagaaccctaagaagctagagcctgagaggaatttaagaattatcaaagcaaagctcttcattttaaagatggcaacattgaggcacaaaagggtgaaataacttactgatggccacacaattagttggttaacaatgggagaaaaaaattttgatgactcacgtctttgttctttttgctctacttggagtagactaggttgaaggaaaaaataattttggaagggaaaggggaggaaatgaaatgactaggcaggaactcatgagattgtaaatggtcagccagaaatcaagttatgttatagaagatgagaggagggggctgggcgtggtggctcacgcctataatcccagcactttgggaggccgaggtgggtggatcacgaggtcaggagatcgagaccatctggctaacacggtgaaaccccgtctctactaaaaatacaaaaaaaattagccggacgtggtgttgggcgcctgtagtcccagctactcgggaggctgaggcaggaaaatggcgtcaacccaggaggcagagcttgcagtgtgagcggagatcacgccacggaactccagcctgggcgacagagcgagacttcgtctcaaaaaaaaaaaaagatgagaggaggaaaaagcaccatggtcttatgggtgtggaattagcaagcactttgaagttatgaaaacctgagttctgaggagctctgagctcttttaaatacacaggaatttaaacgagtatacccaaataggtttgaggaaggaaatgtagccatatatttctaaaaaccaaacttctaaaaactattttaatattgtttcttaaatacaccgtaatgcagtgaaatcttcctgctcacagcagacttccactagattccatagaaaatgcaccaaatgtcaacgataacggtatttatcaggccggacacattttcttctttatgcttctgtcaatgtttctgcaatgaggacatataattctataatgaaaaaagtaaatatgcatcatgcccatgtacctaccaaatacatatatgtgtgtgcacatgcatgtaagttttgtttttctttctttctttttttttttttccctgagacagagtctcactctgtcaccaaggctggagtgcagcggtgtgatctgggctcactgcaacctccgcctcctgggttcaagcaattctcctgcctcagcctcctgagtagctgggaattacaggcgcccaccaccaagcccagctaatttttgtatttttagtagagacaggttttcaccatgttggctaggctggtctgaaactcctgacctcagaagatccacctgtcttgacctcccaaagtgctgggattacaggtgtgagccaccgtgcgtggcctgtgtgtaagttttaagggataaccagaatgaccatcacattcttggagttaaatgtggtacagaaatctctaacctgagagtcaagagaccaggtcatgggttccatttggacatctttcagctttgtgaccattttatgtctgcaaaataagcataacaacactagccctgccttattcacaaggttactgtgaggcctgagtggaatatggtgttgaagtattaggaagctataaagtactactagcataggtaagtaacttgctaaggatctttttttttttttctttgagaaggagtcttgctctgtcctccaggctggagtgcaatggtgcgatctgggctcactgcaacttctgcctcccaggttccaacaattctcctgccttagcctcttgagtagctgagactataggcacctgccaccatggccagctaatttgttgtattgttagtagagacggggtttcaccatgttggccaggctggtctcgttctcctgacctcaggtgatccacccgcctcagcctcccaaagtgctgtgattataggagtgggccactgtgcctggcctgctaaggatcttttattggcctcctaaggatcttttattggctccaggtcaagatgctatctatcttgtgttctcccacctgcagcactgatggcccacaaccctggaaaggctacacttcaggcacatcaggcatttctctcttccagagttggtttcacctaattagtattgacgtgcagagagtctctggttgctaaagaaagaccctgtagtcatgccttctcctttagaacatcacctttattctgataataagggagagagggaaaggaagtaaggagcattgtcataaaaattgcacccactgctgccttgtaggtgagagagggactgacactgggctccacgtgctcctacagagggtgtgaacactagctccagagtctcttctgtgtttccacataatagaaaccaaaggccaggcatggtggctcacacctgtaatcgcagcactatgggaggctgaagcgggtgtatcatgaggtcaggagtttgagaccagcctgaccaacatggtgaaaacctgtctctactaaaatacaaaatttagccacgcatggtggcgtgtgcctgtaatccccacgcatggtggcgtgtgcctgtaatcccagctactcaggaggctaagggaggagaatcgcttgaacctgggaggcagaggttgcagtgagccaagatcgcgccactgcactccagcctgggtgacagagtgagactctatctcaaaaaaaaaaaaaaaaaaaaaaaatagaaaccaagattcctgaattactctaattaaatcatctctggagtgggaaaggcacaacaaaatgcttggtatgtttcatgagaagccctgctgcttctgcccaccactcgcccgcccccatcccaggcattttctgcacatcccagtgagtgctcctccaggggtagggtgggatcaccagatggtgaaggtggtatcctatcacaggagatggttttaacgagatgttatgtattttaagtaacatggttcctatttgaatgaaattaaagataattctatcccagtctgtgtcatgggaaaaacagaaattcatagtggtggtggggcacgctggctcatgcctataatccctgcactttgggaggccgagggggggcagataacttgaggtcaggagttcgagaccagcctggtcaacacggtgaaaccctgtctctgctaaaaatacaaaaagtagcagggagtggtggtgggtgcctgtaatcccagctactcaggaggctgaagcaggagaatcgattgaacccaggaggcggaggttgtagtgagtcaagatcatcctactgcactccagtctggcaaacagagcaagactccttctcaaaaaaaaaaaaaaaaaaaaaaaaagaatgaaagaaagaaattcatagtggtgtatttcttcacatggttgttttccataagtaaggataatttagcttaaaatatgtatcgttttcatatcaaggctcaaaaaagtattctttagctcttgcctcatataattcagttttgcatattaaatgttgaagttatttatgtatcatttaatcctattttttcactctactatattaaatataatctcacaaggaaataagatatatttttctcggttcacgccactctgaacttctcatgccctttaaacaagagctagtgcagtcatgcagttgtaatggttggaaattaaagtttgctcatttccacataattgttttatgtcaataaacaataaacaattgaaaagttagaagttcacacaagccaaaaatttttcatataaacatacacttaatggtttataagattcttgccaaatatgagacaaaatggcccacacaggcagaaattccatctctagatcctctgggaaacagcaaacttatatttagaactcacaccatcaattactgctcctaatggtctttatataagtcatttaatcttcaaagcaattctatatattattactctcctcattttacagatgcagaggccaagaaatttgttcaagaatatagcaaggaagagacaatgctagggtataaatttgcatagtcaggctctaaagatgagctcttaattactataatatataggaggcaacgtatccagcttctgtgggaatacctctagagaaggggatgtcaataacacatatacagctcaactcccttttgcacagacactcactctttcagttgcttgacatttaaatatcaataaaaatgttttaactttctctaatctcaattagcatacagagacaagacatcatattgtgtttctttgggggtgattacctctgtaatcgttagactaacaagaaaattgtgtgtgatagaggcacaaaatagaaaatgattctttctgtttgaaaagttgaggaatgttttttacaggaggtaagtttgatacttaactttaaagttgaattgattggtgtaccttcattgaaaattttctcctgaatgtccagcattaaataaataagcaaacatataagttgcttgttgacctagcctcatatataatgcaagaagtaaacataaacatataaatgttgtaaatgagcatcagaatcatctaatatatagaatcttctgggagagctactttttaaaactataaattaatgatgatagctaataattacttaattctttcatatgcctcttactgtccaaaaagtgtcatatacattaatcacttgatcaaaacaatgaatctagagacaggtactattactagtacttctttttcctatatgggaattgatacccaatatagttcagtagttttcaagagccacacagctatgacaaagtaaaagattgaacccaggcaatctgactgcagaatacttcaaaccgctacacaatacaatctcctctcttggaaaatgttcttttacaagggaactaggttccttttgaactttgctatcacagtattggataattgactgcgcaagtctctcctcaaattcccaactcatgcatgactttttattaagttgtagcaataaaagagcagtggaggtggggtggaagaagactca

SEQ ID NO: 95317 - DNA, 21971 bp, Homo sapiens
  misc_feature (1)...(21971): n = A,T,C or G
tgtttcctcagcaattttcatatttccagctttcattgttgctgttgagaaatcagctgtcaatctgtcttccttctcagggcacctgtttttcttctctggctaaggattgtaagattattggatccggtttttatgttctacagtgatgtgcagataccccagggtgtgtgtttaaaatttacttggaagttgttggaagccgtgtcactttcattcctccagcaaacagattcagagactaagtgatgagtgtaaaagggctatcaagggctaacacctgtgaaagacaagggccgaaagcagaatggtaccgggagagcctcacaccacgatgcagagtgaacagtctcaaataactcacggggaaccgtggagcagtctgcctattaaaggagtgcttagtcactgggtggaggccacccacacagtgcatgtccttagctcaatggctgaagcagatgcagaaggcaatggtctggactgtcaacaatctacactccttgcagctgaatggccagttatttctcaaaaaagatcaagaggtgcacctccatggctgccacaggtttcccaaatctcaagactgttgttctctttcatcaagcggggaaaatctcagcccagacatctcttcatttcccaccaacccagtcattcgttaaaaaaataaattctatcaagcattttcagttcagccacaccagagagacttttgagaacatctagcatgctacaatgccaattagaaacctgttttaaattgtgtaccctgggaaaatttcccattttatcaaatttttaaggagtgaggggcctcttgtctgaatagctgctcagtaagtgtgatttcctcactccaagacacttagaaaacaccagccacactggaccacttctgcaacaaagcactcacctgggacagaagccatctgacatctgctgtctgtcctcacccctatccctctcattaggtaacagcaaacttccctctacccccactcagctccaccctctgccaggaaacttttactttctgactccaggagggtagtgaggcatgtcagtcactgccccacaactggagccagcaactggttcagaggtggccatgtggcccaacttacatccatgatctggaaaggtacagctcccttccaccctttgaattttgagctgcggaatgcggcccgggctactaaggcagataaaagaatgagactcaaacaggcagaagccaagagagcagagaagaccatggtgttctgtcccggacacacggtgcctggatgggctccagcttctcccgagtgccaggtgcccatacaccccaccccggggttgtcctcccttccagtgagttttggactaaggcggataattggcaaaggacattctcttcctgtcctatggcccctgtgaacacgggcaggggaagaagggccagtgattgtctcaccccaaactcctcccacccacccgtaccaaggttcctcttctctgactctgcaaacctctgggaagctctcaggcctcacagagaagactggagggccggatctggttcactctttccctagggtctgaaggatctgcgccctgtgttcaaggacgacgctgaaacattcttttctgcgtgcctgatctgaggcctcacaactcaggtgagcaagactgtgtccctttcacatggagaagccgagttccacggaggttgagtgaggagccggcatcacacaaggactcggaggggctcctcgagactcgcgggacagagacggcagccccaggtgggaaaggcccaggccagggacacgctgggcctggggtgggggaaggggggagccctcgggcgcccccacgaggccggcgcgctccaggtcctggacgggatcgtccccttgcgggcccagtgcagggagcgcggggagctggccgccttcttcctgcttaggttttggcgccgccgcttcttctccacctcgtccgccccgcgctcctcccgctggcggcgccgccgccgccgctcccgcgcttctccctgcgcctcaagcccctagggcaggcgctaggcgttccggattgtcgcgccctccgcctggttcggcaggtctgtccgcggccccttcacgttggcctccagctctcgtgccttccgctggtcccggccccggagttcagcagcgcccggacttcctccctttccgctgcgcgaggctccccttcagctcctgcctgttcctcctctttgcgccttgctggccggctcgtgctcattcacctccaccttgtggacgaccagccccgacggctcctgcggctccttgcaggccacctctgggtgggcttgatcgccgccccggccctcggccctctcggccttggcctttgctcccttccctttttgccgcagctctttcgcttcctcttccggtcccgctccttctctcgtcgccttttctccaaagcgcttggcctcagctccttagcattgtcctggccccgggcctcctgtatttcctcctgcagtcgcagtggttttaatgtatgggggaaagagaaccattgtacaggcctttgatgaggtcgctatcttctagtgagcgtttgccctgggacgtgactttcgaaagtgcttctcagcatccattcccccctcccctccacttaggtctgagacaggaatgctagaagggttggagttgaatgtttctcttacctcacttcagttaggcccttgtaatttcccttaagggaaggaggaccagaatgctctggacttatatcacaatggttatttttctccaccttctgccaggagcatgaagagactattctccagtattcacagtgagaacttggtgggcatcctggaggtaaaacacaaaagtgtgaagaccttctgagactgagcacccaagagttttaaactgtcaagtttgtctacactgagtctcaacaattcatgaattattacatgtttgtatgttgctaaaaatactggcttcatctgtggtcctctgaacctgggctttagtttctagaattgagaataaattgtgattatctgtctttaactgtctgtctcttttcaggacagcactttgctgtgacttcaattctgtcatggatctgagaagatttattttcagtttgtttagttttctcattgatgagaagatgggagggattatcccaaactttacttgttgaagtgaaaaccagaagttatgctaaatgttaaagtagataataagcaaaaaaaaaaaaaaaaaaaaaaattagcttggatatagaacccttcttcagagaagatcaggaaaggaagaacatttatttctttctctgcaaaaatataagttttgttgttagcaaggaaacagtcaattatcaaactttagaatcttgacataaaagtgagttagcacatgtgagaatctgtaaactagacataactaactctaatgcttttctttaaagacacaaacaacatgctttctacgtgtataagtcacagtgaagaaggagcttttctttatggtatcactgttgttgcccagcccatctctgtatctcttacttgtatggtgaggaagtactcagtgacagctcaggtattccccaattctgctcttcttccacataaaaaactttgatgaagtcaaattttggtttgaaggtcttgatgaccaccctgtgggaggctgtagggtattctcaagctctctgacatctcacactcccagcctcaggtgtttcttcccttggacaccaggatccttgactctggtcttactctcccttagtcacaagtctcctcatctcatagtttcccatgacggttcttgctggacatcctcaaggatctctgtcaaactgacaataattagaggcaatctcagaattacgcatgtgccaatctggattgcaacattttaattccaggtgtcaggtttccaacaatcaaggagaaaaatgaccataatccattgacaattcctctcccacactcagtcaaaaatggtccagatcacagtcctacatgctggaattatttcctctgcttctctctcaccccaccttggccaaagattttctagcaagatctgaattttaatccatctctcttcgcctgtgtgtcccgactaatttggcagaaggaattctttcttaaaaccttgccatttaattcacaaatggaaatgtgaagggtcaataggtatgtgaagaacctattcacccgtattcactgggaatcagagaagtgaaaatgaaaagaacactgagctatcatcttagatacacaaaactgtcaaacatttgaaggtggctaacaccaaatgtcaatcaggatatgaggaaagtaggaattcttctatacaagaggacagaaatctggcagtgccaaaagaaaaagtacatctatgatctgcccctccgcagatcccattcctaatacatatatcccagcgagttctgctaatctgcagaggatgtctagaaacgcattcatcacatcagtgtttataataaccaggagtaggaggcaatcaaatgtccttcacaagtggaactggtaagttaaagagacttaggttgggtttctctaaaaccaggccacaagacaaagatttgtattccagtggcttattttgatttaggagatgatttaaggaatcaccagtgcgggagtataacagtgaacccaagacaccttgagatcaataaaaaggtgcattgttggcaggctgcctgcaaagaaagggagcataatcccagtagacaacaccaggaggcagttttgtacatgcctaagagtaatcccaccttagcatgtagaacacaaggatatttagtctccagttcccatcatgtgggctgagtggtggtcccaggtgctttaatttgtagtccatctgcccaagcacaggccaaaagaaagccttcccacagagagtcccgagttcatgtggcagcatgccagaggtatgtactggaacagtaggtgctaaaggcaacaattacatcatgaaaactgcacatctcactcatatgtggaatctaaaagtaatttagctcatagaagttaagagtagaatagttagagtagtagaaagttaagagttgttactggagagaaaagagggtatggaagctagaaaaaaagctagaaggaaggattttgaatgttctcatgacaaagagatgataaatgtttgaggtgacagacatgctaattaccatgatttgatctttacacaatgtctgcatgtatcagaacatcacacactaccaaataaatatatacaattgttatgtgtcaaaaaacattatatacaatgtttatattttatattaatattaatgtaaataaaaatttacacaaatcttttcattaaatatggtgtggataattatattatctgatgatacccatgccacaggctaggagaaataaaaatttacattaatgttaatgtcaaaaaagcagaaacaaagccatatgatacatgtgacacttataccacatgcatagagttatttcagacacattgtgtgttacctttgggtagagaagtgaatgagagtgaggatgagagatgaaaagaggcagaagaaaaagagaggccttataggaagtgatgaaagtgtgccataaactgagagtatgactaaaacctttcatcttcctcttctgccgcttctaagttattggttctgctgttccttgacctgtttcaagctctcaccttctatatcacacatgggaagtctggcatcagacttccagagagcaagaactaggtgaaatacaagggcacagctctcctagcctgtggcatgggtatcatcagataatataattatccacaccatttttaacgaaaagatttgcgtaagagattcacagaggcaacctgaggccctgcaactacatttcccagagatccctgaggtgatcctaactagactctggtgtcagggtgatacggaattccagtgagatcacttcccttgcagactttggaagggagagcactttattacagaccttggaagcaagaggattgcattcagcctagttcctggttgctggccaaagtaagtagaactttgtaagtaatttgcagtgtactttgaaagtggggtataaattaaaaataaaatcaagtccccctactgactgaatggatcccctcttgtcctaggcgaccccagagaaacctggaaaactaaattccaggccataatggaaagggaggtcagacacgcctcattatacacactcccttttggagttcaggcacaactgaccagcattaacattgaaacagtgatcataagactgtcaaaatggactgtttgtgggaataagataccaaattccaatctgactctggtttagcatcacatgacaatagcagaccctgaaggaaatcaatatatttaatccccaaaatatatttctttgacacatattgaaatggtcttgcaaaaccatcttttatggggaaatttgctggtttctggctctgctctgattgaggagagaataaatgagagtctgacaccttaaaaatctgaaaagagatatttaccatctgttttctctaaggctgctagctggaggtttcatctacatgacataaaccatggttcccataagcccttttaactcaagcatttaattgtactgaccgcaagtctttagacaaaacttaactcttcaacaaattgccaatcacaaaatctttgaatccacctttgtcctgtaagctctcctacttcaatatgtctgattttcaggcagagccaatgtataccttatgtgrgggccataggctgttggccccctaaagcttcactaaaagtcactgtcatgtgayaggttgattaayaggggaaagggagtacaaatttatttaatgtatatacatggtctattagccaggaccctttagagggccagaactaataggatagatgtatacataaaggggagtttattaaggagtagtgagtcacatgatcacaaggtgacgtcccacagtaggccgtctgcaagctgaggagcaaggaagccagtccgagtcccaaaacctcaaaagtagggaagccgacagtgcagccttcagtctgtggtcaaaggtccaggagtccaaaggctgaagaacttggagtttgatgtttgagggcaggaagcatccagcacaggagaaagatgtaggctgggagactaagccagtctagtctttccacattcttctgcctactttcattctggctgtgctggcagctgattagatggtgcccacccggattgagggtgggcctccctttctcagtccactgattcaaatgttaatttcctttggcaacaccctcacagacacacccaggaacaatactttgaatccttcaatccaatcaagttgacactcaatattaaccaccacacttgggaaacttgagaatgaagacccaacttcccagtaagttacagaaactcatgtattattccgaggccacagtaaagagtggagactcaaagcatggccagaawcaggtaaattagttttagtggcaacacaggttaagagagagaggaaggaagaagctcrgctagcaaaggtggccttgttatgtagacgaaccttttctcagaagcaaaagatggtaaatgtttctatccagatctttaaaggtgtcagactctcaatcgctctggatcctgggaaaggcttagaaacaggagagggtatggctgcattaatggacattgtccacagacgcaaattttcctcagttaagacagttttgcaatgccacttctgcttkttggccagtggaaaccatttttaaatatgtcaaagaaatatatttgagggtaaaatattttgattttcttcagtccccactttgaaatttaaaacaagtttcacatactaaaagccaaggtaatagctttggggagatttaagttagaggtgtttagatagagacagtcatagcagtggaaaaacacatttgggataaatataaatgagcaaatttaaatatatcattccatattttctttaggcagtcccttggttttgaggtgagatcagttcagttaaatatctacgtcccattccaggaggtgggactgcaaatggtttaggcctytagacgtaatgtaggcaatcagatttctagtaggaggcatttctgtagaaacagaaaaaaataaataaataaatgttactatctggagtagtctatatatctagaaaagctagtctatagctttttctctgaggcgtcttcatattgcagtggcaatgtcccagatttccctggaagttcaaaccaggtgttccactgaactttctgagaaggcctcgcatcagcagatatgcatgaaggttgtttataagttactgttattttctcctgataccttcagtttgcaagactttaagaaaaccccagttttaatttctagtgaattcaagtaagaaaaatgggagaaaacgttgaaaatgttactttgcagacttgtagccagaaaaaaattcaggatttggtctaacttgtaaaaaataataaaaactgaaaaaacaatgggcaaggctagaagatactaacagatacactatagtttttgaaacatagtatttctgcttccagttcttcaattttatgaaagacatagtttcatgcacatccgtgtgaagagaccaccaaacagactctgtgtgagcaacatggctgtttatttcacctgggtgcaggcgggctgagtcctaaaagagagtcagtgaagggagataagggtggggccrttttataggatttggatagataaaagaaaagtacagtcaaaggggggttgttctctggcaggcagagtgggggtcacaaggtgctcagtaggggagctattgagccaggatgagccaggagaaggaatttcacaagacagtgtcatcagttaaggcaggaacaggccattttcccatcttttgtggtggaatgtcatcagtaaggcaggaaccggccatctggatgtrtacatgcaggtcacgggatatgatggcttagcttaggctcagaggcctgacacacagtagaactgatttatttgcaaaataagttttgttactatacttggtctgattttttgcatraagggcagcaagaataattatttactatataggctcctttttaaaaaatggctttgctggaacattcttttttrtaaagaatctcatattagacctcttaaaagcatcctgagcccaaccaaggatttatctgtttctacgacatacctgtatgaattaagtgaattctctctcaaggtcccaaaataagttggggttcctgggcctgtcagaatgtgacyttttacccattacaggccagaaacctgtaaaggaacctgtaaaggaactgcatagacaagctgtgaggccagttttatccacagggctattatcagctttataaagtcccaatatcaatttcttaaaaatagggcattccagtcaaatccttgatttttgtctccacttgtggcctgttacaaaacaaaacagattctaactgaatttatgcaaataattatattcccataaattagcaataatcactaagagtttccaaatttcagagaaatcaggcagatagagggaaatatgcttcaaattttgctcacaagagtatactttacacaaatattaaaagctgtaaatgtctaaaaagaaaaaaattttgactctgaaaaacaaaagtggcaatgtttcaacaaaacccataaaaagattatttcagtcttctattatttcagtccatgcaattaactcctattctgttagatattgggtgagcaatcttcatgaacatattagttctccatgagagtcctgggagttttttttctctataccagtggcacaatctccaaagttatcataaagcttcattcaaaagcaccccttagagtcctayagctaattgcaaaccacctttttaaaagcaccaaagtagaacaactgtcaatgacagaagtcttaggacagccatggtcaaggacacacttaacaaggaaatttggttatttctgtggcatataacaatttaacataataattataaatactaataacatatataaagacatcagaatgataggaatatcacgcaatgttgaaaaacatactagtaacaggtttaatataaatgtagaacaaataaagttgaacaccatttcatatttgacaatgtttcctatatgattttaacatgccaaatacaccgaatatgtctgtttttggcttcaggggacttaatatcaaaaaagataatgaggtcaacaagactgaatttagaatttgattttggaaagtttgattttcttcagtccccactttgaaacttaaaacaagtttcatatattaaaagccaaggtaatagctttggagagatttgggttacgggtatttagatagagacagatattgtggtggaaaaacaaattacaatcaccaaacaggtcattgtaaataagtcattcatttaggcaaagtgataactcaaagatttcaaaaagtaaaaaccttcactctttgagagagaggactcactttcacaaacaataagacstaataaagacagcatgaggccaactaaatttgtctctcttccccaacccatcttttttttttttttttttgcagttttctcaaaaggtaagcaaaaatctttcactatctcttaatattaaaagaaaatcttattcaaaggaaatctaaattttaccattgcatagcttattattaatgctaaagttagcattaataaaatcttacaaacaaatctatttaattagttgtaacacaaggtagagatttttataaatcttttacaacattttataattttccataaaagagcagattagtattctaataaaaccctgatattttgacataagggcctagattctggccctgaattagtatgctttttattttaaggtttaatttatgcaaaaactaaataatccctttcaaattttagccagctggcttatatatagaattccttttacaagatcaatgatcaatctttcataaacctttagttttgtccacatttttaacttaaaacaatctttaaaatctaaaaaatttttttttgttcttttgagaccgaatctcactctgtcagccaggctggagtgcctgcctccagggttcaagtgattctcctgcctcagcctcctgagtagctgggattacagctgtgcatgaccacacccgcctaatttttgtatttttagtagagacggggtttcaccacgttggtcaggatggtctcgaacccctgacctcgtgatctgcccaccttggcttcccaaagtgctgggatgacaggcatgaaccaatgcacccagcctgtaattttttaaataaataagactagcttaatattcgtttcataaaaacagctaaatcctgagctatctgtaaaaaaatacgtttaacattaaggtttatacttgggtgaacacctgatattcacaggctataaaatagttagcaaggaaataactttaaatrtgacyagttttgtctaatgtctcagttctcaaagcaatctaggtaaactgctaacaatgaataaattgaacaaatataagtgggatggataaatgcttgytggttaacttttatgtaatttaaaatcttaaacttattttgsattaaagaacagctactcattaatagtttggctcatttccaattaagtagagatatggagaaacaygcctaaaaattatagagtgatttcatctataaagtactgatacctgatatgcagtttaggatttcatgtttcctaggtttaaggtcactaaaaataaaaattccacttaatatataattctgtttataaagtctgtcaaagacatgtttttgatgaaaaaagaaaataatataagacaaatagaaaaatgtattctcattaaaaagaaaatcacttttgtctaattcaaaggttatttatgaaacaaagtaaaaaggaaccagtaaataggggaaagagatgtaaagaaagttatagatataaagatgtatttgtgataagagagattaaaaagaaaagagaattattttgtatgataaataaytttatayttttttctgaagtaagatgactggtaatctaagaaagagggaaatttaggatacaatggaaagtccaatcatgttggaagtggcatgtgtataatcaaattcataaaagaaattttgtttgtggttatgttggctttaattaaaattgaattatttatagtcgtctttctggaaactgagctttgaccaaaaaaaccacaatacaaaaccaaaacattggttagagcaataagggtttcttaaagtattgatttgctcttcattaaattccaagaagttttaatgtttaatgctatttttttctttttgaaacttctcagatatctcagaagttcaacttctggtgtatcctgctgcttttagccttttcttcatttgagaatagctgagatsttaactctctctttcaactttttgttggctctggcaaattttttttttcttcaggtctaaatctgttgctrtagcctgatgctgaagtgtttcgtcttaaagcttcaaaaaaagcaatgttttcttccattatcacttaattctgtgctgttggcttttcctcctatgagtaagggccagaaaccctctgaaggattactgaaaaatcaactcacaaaagatagatcagttgaagagaaggcatgcagatttgtttggagtgtgtatgctggagtcttcagaataaagaccccaacacacaggggaaattgtcctttttatgcttaggtgcgacaaggtatgggcacatataaaaatatgattgaggcaraaggcataacctaatgccaatggactggggaaacccagcaagacctgtctgtctagattcctcttgacctctctgagcatgtactccttccttctgggtatagggatcttatgacctacaatccaacaaggtaagttggataatttctttatggctaattcatacayagaaagggagagggcaaattagagtaatatttttagactttgtggctggttttgagaaaaaggagttctgatttctaggttctgccttggggaaagagattctagtttgtttggccagctttgagggatattgggactgagagataggaggccaggagaaggccaaagaaaaactgacttctgaagcttttaccttggggcactgtcttctgagctacaacgtgtatttaaagtcttcgacgaaaccatgaaacttcctatgctggtactaagagtcacgtattcccctgctcaagttactagtaaattctttgttagtattgttcttcagtgggttctccccagtagctttgggttgatatcctcccagcttctagccttgcagcataatacatgtgcttagatttcagcaaaaatgcctcaatagagtttcaatgatctacttaggtcacatgccacccatcagccaagctttggtcctagagctgttgtgtttgaagtggtcctacatagtttatgtgacagcccatagagctcaatatgggcagcctattgtccacacagyagctagacagatcactttgattaggcgaacactgttccgcttataacccttctctcatcctgtctcactttgatttctcatctcgtttagaatagaagccaaaatataagcattggctccaaggccactgttagttgtcagatatcatctcaatccattccccttctcactgactgtgctccagtcaccctggcttcctggatgtttcctcaayactygggacaggttccagctaaggatcctggtactttctgttccactgcatggaacaatcctcctcacacatatccacagaacttattctctagcatccttaaagtcttagtgagcctttctttaaccaccttgtttgaattcagtgctctccctgtgcacccactaacccctctttttgttttcaccaggcacttaccacaatctaacagactgcatgttttatccatttattcagtttcctatttgtgtcccttcaactcccattaaaatataatatttttgagggcaagcaagtactagaacaataggaaacacatcaagagtattctgtaaactatttcttgaatcaatcagtgaatgaatgarttaatcaatatattttttgagtgaggagctttgtgttaggtacagctaaatgggaaatcaagtgggtcatgtaccatraataccatatactctactgtataattctcctgcttatatcagaaactgtttataagcctattayaattgataccaattggaatctcttttttactcatcaccaagaacaccacaaacaagttgtttaccatttggctccttatttaatctggatttcsaactcctcatgcttaaaagayggaagatacaataatactttccttacagggttctgagactactaagagaacttatgcatgtaaaagggattcatgcagtagaaatactaacaaaagaattactatgacagatacttataaccattgtgtttttacrtatttaaaatacgttatacctataattagtcacacgaggaaatcaaatgctaaagtatgatatgtttttatgttttgtttttcttgcttaggggatcatggacattgaagcatattttgaaagaattggctataagaactctaggaacaaattggacttggaaacattaactgacattcttgagcaccagatccgggctgttccctttgagaaccttaacatgcattgtgggcaagccatggagttgggcttagaggctatttttgatcacattgtaagaagaaacyrgggtgggtggtgtctccaggtcaatcaacttctgtactgggctctgaccacaatcggttttcagaccacaatgttaggagggtatttttayatccctccagttaacaaatacagcactggcatggttcaccttctcctgcaggtgaccaytgacggcaggaattacattgtcratgctgggtctggaagctcctcccagatgtggcagcctstagaattwatttctgggaaggatcagcctcmggtgccttgcattttctgcttgacagaagagagaggaatctggtacytggaccaaatcaggagagagcagtatattacaaacaaagaatttcttaattctcatctcctgccaaagaagaaacaccaaaaaatatacttatttacgcttgaacctcraacaattgaagattttgagtctatgaatacatacctgcagacgtctccaacatcttcatttataaccacatcattttgttccttgcagaccccagaaggggtttactgtttggtgggcttcatcctcacctatagaaaattcaattataaagacaatacagatctggtcgagtttaaaactctcactgaggaagaggttgaagaagtgctganaaatatatttaagatttccttggggagaaatctcgtgcccamacctggtgatgratcccttactatttagaataaggaacaaaataaacccttgtgtatgtatcacccaactcactaattatcaacttatgtgctatcagatatcctctctaccctcacgttattttgaagaaaatcctaaacatcaaatactttcatccataaaaatgtcagcattyattaaaaaacaataactttttaaagaaacataaggacacattttcaaattaataaaaataaaggcattttaaggatggcctgtgattatcttgggaagcagagtgattcatgctagaaaacatttaatattgatttattgttgaattcatagtaaatttttactggtaaatgaataaagaatattgtggaaaaactcactgtctctaaagtttatgaaaacattgttggctaatatattgtgaatcaaagtttttctttagacgacttaggatattatggggctaggcattttttcctcaatagagtcttcctctcatcctctttcttgtctcctagttacattcttttacttccatccatactttgccacaagagaaggaacatgagctttattgtgtagatctgatttgaaatcctgtggacacggggtgaattacttttaaaatctgtggctctgattcctcaaagataaaatgcaaataatatttatataattcactgccagatataaattttcaaaactatttgttatatggatgaataacatcattaatattgtggttgctgggccagcatttgccaaaagttctccttccattttgctttattttcctgtaacttgaaattctggtcctactgtcatctgcctgcttcttccttaattaaatattgataggatatcagatgtctcggatctgagagtgtgccttgtgattcaaaatctgaatctttacttatccataactcagattttctgtttgtaaattccagtatcagggctatagtttaaactgcagatttgttcttaacactattctccctcttcgacttgtgatgactataataatcttaagagaaaagcagacattagaatgaataaatattcattaggagaataaattacattgaagcatcagtattttaggcagcagtgtaatagttgggagatactggtgagtgtagatatcctaggaagaggtggataggagatctggcctcagtgggaaggacaaatgaaagacatatagcaatatttgagagcttgtcatctttcttacctattagccttgttcagctctcctgctatcttgttgcaatgccaggtcaccactggtgctcctaggcagacccaagtttctcacattctgagcaagatcacatcacaggaggatgtggtggcaaaaaacaaaaatgaaaacaaaacaatcaaacaaaaaaccagataaaaatgtggctcaagtatgatgatacagttgtatacaaatgaatcaagtaaattatattgcacaacgagtatcctgaaacctaattcagttgttttgttcttgattatatatagcacataatggaaaaagcaaaaatatgttcagagagattcagaaatacacaatttcgcttccaggttgaagccttctgcccttattatgcaatgttaccttttctctaatgaaatctaaatgagtgaagaagaatctcaccaattgatttggccagagattttaaggtgcctcttaattgtttgtgtttgtccaaacccatgtctctgtttttggtggccccctggagactaggatgtggcatatcttggtagaactctgagataagtaaggtagaaaccaaaccttctagacgtaactgggaaggtaggatgttggatgtatattccagttcttctattttcaaggtgaagctgagtgtgtgtgtttatctgccactctctctgctgaaagccagggagattatatggggcaagtacccatactggtgttcaggcggcagcctctgatcctagggagatacctattggaagtaagcctacgtcatatccacctatttgttttttgtggcctagggacattcaggaatggaaagccccactgattcccagagctagttcattaagaagacagtgcctttggtgggagctatataagttgtggctcttggtgtgtgaactaactccttcaaggtaaatgaataggcctagatttattactggggtgagctggaagaaaggctcaggaagtgccaagctgtggctcagattactggagggctactgtttgctcaccaatgcaaatgtattagaagcaagcttgtcaaatagtcatggaaagaatgtgcaggaaaatccttctggagggaaaaatgggagctgtgcattccagaattttttctgcactgcacccagaggatgtagcccctggaagtacttagatgcccattgaaaaccacctctttgtcctataatctagagagactcacatgtgccttcttccgttctttgagctagaaggtatttaggattcagttaatcgtggttgctataaaagttgcagcacctaatgtatggcataaataaatcctttctgggaagaaacacggagctgcatttttagagttccttctccacactcctcccatagtatgaagtctgtggaagtgcatgcaggctcatataactgccttttcctgtggcctagagagacttgcatacacctagtcccctctaccccagagttgggaggtttaggatgcagtcctaagagtggaaagagtggacaaactcttttcaggtcggattaatagacctgcaattatcactggggttaggggagaaagcacgggaagagacaatctccttctcaggctgctagtgggatatttgtctcctttctccccagtgcatgttggaaaccaggccaccaagtagccactggaacagtgtgccataaacccattccaggaagtgacagacagctgcattttaaagccccttctgtacattgctcctgggggataaggctcctggaaatgctatgcacctgtataaaatcacctttttcctgtggtctagagagacttgcatatgtctaattccctctacttcaagaggtaggaggttgaggatgtagtcttaggtggaagctgtaatagtgggatgctcatcatgtggacaaactctaggaggaatcagtagacacaaaattatagctgactagattgggagaggcagttgtctcatctaacatacagaaactaacacagaaagtcaaagaaaatgatgaaacagagatatatattccaattaaaaaacaaaataaatttccgaaactgtacccaagtgatgtggagatatgcaatttacctgacagggaatttagaataaaggtcataaagatgctctctgatcaggtgaccaatgtaggaacaaaactgtgaatttcaacaaagagattttttaaaagtttttaaaacaccagacagaaattatagaactgaaaaatactctgactaaaaaatctaatagagatgttcaacagcaggctacatcaaacagaagaaagaatcagggaactcaaagacaggtcattgaaagttatcaagtttctgtttcaagaaccagaaataccatttgacccagcaatccattactgggtatatacacaaaggaatataaatcattctgttctaaagacacatacatgggtatgttcactgcagcactattcgcaatagcaaagatgtggaatcaatctaaatgcccatcaatgatacactggataaagaaaatgtggtacatatacaccatggaatactatgcagctataagaaagaatgagatcatgtcctttgcagaaacatggatgaagctggaggccattatccttagcaaaccaatgcagaaacagaaaaccaaataccacatgttcttacttgtaagtgggagctaaatgatgagaacacatggacacatagaggggaacaactcacactggggcctactggaaggtgaagagtaggaggagagagagaagcagaaaaaataaataatgcgtactaggcttactacctgcgtgacaaagtaatctgcaaaacaaacccccatgacacgagtttatctatataacaaacctgcacatgtacccctgaacttaaaataaaaattaaatttaaaaaataagattaatatctgcatacaaatctttgtttacagcttgttatatattgaattatgtctgctcccccaacattcatatgttaaagcccaaagttattgtgtttggaaatagggcttttaggagatatttaaggttaaataaggttataaacgtggagtcttaatctgataggattggtggctttataagaaaaagaaaagagattgctctctccccagtgcagktaccaaggaaaggccatgtgagaacatagcaggaaggcagccatctgtaacctaaggaaagagatctgtcaaaggacaaaactacaacaaatgtaaagatctcaattggctttatctgcgattctggaatcaggcaatactccatttcataaaacagaactagtgctccaatgagctgagcaaaaggggttgttagttttatagacagagaaggacggaagaaagcagaaataacgaatggaaagtagattggtcaaatttactttccttttaaggcagaaaaatagaacaataactattcaagtaatcttaaggttacttcaggttaagggttaaaacagaaggaattttatcatcatgcttattgaagattcaaactggcctgtttaagaaattggctgttatctctttctatcttttattttaagaggcttcctcagataccatgctggtggaagaaggggagtgccacctttctacggccaggtggacataaatatccaagttccccattcaatctccttgccattcaaggcaaggtaccttgttactgctcagtggagacgaaaatttctgatttctcagaaggtcaggtaacaacttagttttagtttagtgatgttgatcctcagcctgagtgactccattgtgatttttagtctggtctgttggggtttggtgtaggatcttagtccaaaccaactgcctcctataatttttaatttaacagccctcgccaggtagtgactctgctggcacactgatttggactttttagcctccacaacagtgagaaaataagtctctgttgtttaagtgaaaaaaaaaaaaaagaaaaaaagtcacccagtttgaggagcaaaaatagaaaatagtgaagccattttaagagactaatggaataccatcaaccgaccatcatatgcattattgatgttccagaaaaatacagaaagtaacattgagccagaaacttctcaagcttttagaaggaaacagaaatcctgatttagtaagctcaaagatgccaagtaagattaatacactgagaaacatcataatcaaattgtcaaaagttaaagaaaaacagaattttgaaagcagcaagaaaaaagcaaattgttatgtacaaaggaatcccaatgacattatcaacaaatttttcagcagaaaccttgtaggccaaaaaggagtaagatgacattttcaaaactttgcaggggcggggtggaggcgagtagggggtgggaatccaattaagaatactctacccaacaatcctgtctttcaaaaatgaagggtgaaaaagactgacaaacaaaggcttagtttatcaccactagacatgcattgtaaaaattccaaagggagttctttaagatggaggaaggggatgctaattagtagcatgaaagtataaagcttactgatcaaaggaagaacattttcaaatccaagacactctaataccgtaatggcaatgggtaggtcaatttagtatacrttaaaacgatttagtatatgctatacctttaacctttattgttttaacatacactaaattgacctactcattgcctagggttaaaggttaaaggtataaactttaaacttagtataaagattaaaactcaaaactattaaaaatgactaaagctgcaataatttaagagacatgaattatgaaaagatgtaaattgtgacatcaaaagtataaaatggggggaagaggagtaaaactatagagtttgtgtatgtggagagatagaatgctttatgtcatggctttatgtcagagcatgtgatcaatcttaaacaatgttccatgtgcagatgagaagaatgtatattctttgtgtttgttggccagggtattctgtagatatctattagttccatttagtcaattatagtttaagtccagaagaaagttaaaaccgtcaaaagttaaagacaaaaaaatagtcttgaaagcagcaagagaaatgcaaattgtaatgtacaa

SEQ ID NO: 95318 - DNA, 13993 bp, Homo sapiens
taaacccaggaggtggaggttgcaatgagtcgagatggtgccactgcactccagcctgggcgacggagccagagtccgtcttaaaaaaaaaaaaatccagttacaactgctgctaaccagagtgtatattcaggataactggattctatgctcccaggttataatcatcaaacttggcccaaataagctctctgcttatgttaattttgtttcagcttcttccttttaggttgctattttgtaatttacatgcataatggaaattatattacgcttacattggtaagagtatcttatatcaggaagagggctgctccagacaaccttttttttttttctttttttttttgagacagagtcatgctctgttgccaggctggagtgcagtggtgcgatctcagctcactgcaacctccacctcccagtttcacgtgattctcctgccttggcctcccgagtagggactataggcacgtgccaccacacccagctaattttttgtatttttaatagagacggggtttcaccatgttggccaggatggtctcaatctctggacttcgtgatttgcccatctcggcctcccaaagtgctgggattacaggcgtaagccaagcctggcccagacaactttgatcaccggagacttcatctgtgtaacaagacggcctttattcaccatacacatcctcccctcaccctcataacccctgagaactcccatcccctgtttctttctgtagctcaggatgctatataagcttcagtcatctgacccttcgagctacatgttttttggtactcccttgtgtatgtgtattagggttctctagagggacagaactaataggatatatgtatataaaggggagtttattaagtattgacttacatgatcacaaggtcccacaataggctgcctgcaagctgaggagcaaggagagccagtccgagtcccacaactgaagaacttggaatttgatgtttgagggcaggaagcatctagcatgggagaaagttgtaggctgggaggtgaggccagtcttgtcttttcatatttttctgcctgctttatcttctagccccactagcagctgattagatggcacccacccaggttaagggtgggtctccctttcccagcccagactcaaatgttaatctcctttggcagcaccctcacagactcacccaggatcaatacttcgtatccttcaatccaatcaaattgacactcagtattaaccatcatagtatgcatctaattagaaatggtttctcacctgttgatctgtcttgtcaatttagttcatagtccagccaaagaacctagaggtgtggagggaagccgttttcctcttgcctacacctgactgtgctctaattggggagttattcctttgtttcccagtgccagacaagcccaggagggcagcagggaggtccttgccccttccttctcccagtggcagccagctggggcctgggcctcttaaccctgtgcccctagggatcgggaagggagtttagaagcatctgtcctgggctgtttgctagggctcagtgcagggcaagaacagggacctggtggttgtgggtggggttgggctgagattgctaagaatggggccgggcacggtggctcacgcccgtaatcacagcactttgggaggccgaggcaggtggatcacttgaggtcaggagttttgagaccagcctggccaacatggcgaaaccctgtctctactaaaaatacaaaaattatccaggcgtggtggcgtgcgcctgtaatcccagctactggggaggctgaggcaggagaatcacttgaacccaggaggcagagtttgcagtgagctgagatggtaccacggctcaccagcctgggctacagagcgagactctgtctaaaaaaaaaagtgctcgctttggcagcacatgtactaaaattggaacgatacagagaagattagcatggcccttgtgcaaggatgacacgcaaattcgtgaagcgttccatatttttgaagggattacaaaccaagagatacaagtggcttctagaaattagaaaataaaaggtaatggattctgccctggagccgtgacaagaaatactggccttctgacatcttgattttatatttctgatctttagaactgtaagaaaatgaatttgtgttgttgtaagccaaaagcaaacaaacaaaaaactagaatggggtggggaaggtgagggagcgatgaagagggatgagcttggggcctgggaacacatccctccagaggaagctcagacacagctccccttctagggcaccccgagttcattgcaaccttgctgtgacaccacccccccgccccaccaccatggaagagaaaccatgggctgaggtttctcttccaaagctcctgtttctcaatctcttgccatcccatcgccaccccctgccacagcctttgatgttattaacctcaatgtcaaaactggaacttctgggaagtccacctctgcagcagcatgtgtggtggctaaaagcatggcttttggaggcaacagaactgccctgtaatcctggcaaggcagccttgtagcttcatgatcttgatcaagtcacctgactcttcaggcctatttcctcatttgtaaaaaattcgaaatagggcaggcgcagtggctcccgcctgtaatcccagcattttgagaggccacagtgggaggattgcttgagcccaggagttcaagactagcctgggcaacatagtgggaccctgcctctacaaaaaataaaaagccaggtatggtggtgtgtgcctgtagtccccaactactcgggaaactgaagcaagaggatcacttgagcctgggaggtcgaggctgcagtgaggtgtggtcgtgacacttcactccagcctaggcgacagagcaagacactgtctcaaaataaaataattgaaataataatagcatctatttcatgacattattgtaaacctggaatgagattgtaccattaagacctggcccaggggctggtcccacaccccctttctcatgtgccttctacctagttcaatactgttcagcctcctgcagtttataaacattctgagtgtctggttggaaacagtggtgaaccaacacaggctctgccctcaggtggcccctagtcttgatggagacccaccatgtggggcagggctgacacaggtgttgctgggcacagaggagacacaggcttggggtgaccagcgaaggcatcctgagtagtgccaccccacatatcttcctagcacatcatggttttattttcaccgtgacacttacacaatagtttctaattaagtgcctgtttattgtctgttttttccctccagaagtcagctttgtgacaagaaactctatccacctcgtttatactggtgtctacaatagttcctaacacacagtagaggctaataaatattcactgaataaagtaagtggtatcattaactggaagccaggaagcaggagttagcatggtgaaaaaggcagcctgcataggagctgaaaaaatgaacataaaatgcagaagcaacgccgggcacagtggctcatgcctgtaatcccagcactttgggaggctgaggcgggcagatgacatgaggccaggagttcaagaccagcctggccaacatggcgaaaccctgtcgctattaaaaatgcaaaaattagccgggtgtggtggcatacacctgtaatcccagctgcttgggaggctgaggcaggagaatcgcttgagccagggaggtggaggttgcagtgagctgatattgcaccactgcactccagcctgggtgatgcatgtctcaaaaacaaaacccaaagtgcagaggcaaggccaggtgccctgacaaatgcctgtaatcccagcactttgggaggctgatctgggtggatcgcttcagctcacgagtttgagactagcctgactaacatagcaagacccccctccagctctacaaacactacaaaaattaggctgggcgctgtggctcatgcctgtaatcccagcaccttgggaggccaaggtgggtggatcgcctgaagtcaggagttcgagaccagcctggccaacatggtgaaaccttgtctctactaaaaatacaaaaaatagccgggcatggtggcagatgcctgtaatcccagctactcaggaggctgaggcaggagaattgcttgaacccgggaggcggaggttgcagagagccaagatagtgccactgcactccagcctgggcaacagcgcaagactttttttcaaaaaaaaaaaaaaaaaaaaaagccaggcatggtggtgggcacctgtaatcccagctacttgggaggctgaggtgggaggttggcttgagtctgggaggtggaggttgcaaggctgcagtgagccgagatcacaccacactccactccagcctggggcttagagctagaccttgtctcaacatcaataacaaaatgcagagtgcattttgaatgcaacaaaaggcttgttggtggaaatcagagagcagggtcgaaggtgtggaatattgaagagttttgagagttgaggctggacagtgacatccgggaattgggattttgactaggaagcaatggggagccactgaaagtatatgacttggtcagatttaggtttaaaaaaccaagaaggaagggatgggggagggagagagagtgatagggtaggaaggaagggaagttggctgctccagcatggtaactggaattgaagagtgtaatagtaattgagggaggtttggttactaggtcagtgtcaggaattctcaacaaaaacgacggaggcctggtggagaggaggggactctcaatagagagattttttttttttttttttttgagacggagtcttgctgtgtcgcccaggctggagtgcagtggcgtgatctcagctcactgcaacctctgcctaccgggttcaagcagttctcctgcctcagcctccctagtagctgagattacaggcatctaccaccatgcctggctattttttgtattcttagtcgagatggagtctcaccatgttggccaggctgctttcgaactttttttattgttgttttttatttttgagatggagtttcgctcttgtggcccagtctggactgcaatggctcaatctcggctcactgcaacttccgtctcctgggttcagcaattctcctgactcagcctcccgagtagctggaattacaggcgcccaccaccatgcccagctaatttttgtatttttagtagagacggggtttcaccatgttggccagtctggtctcgaactgttgacctcaggtgatccacccgcctcggcctcccaaaatgttgggattacaagcgtgagccactgcgcccggccaatttttgtatttttcgtagagatggggtttcaccatgctggcaagactggtctcaaactcctgacctcagatgatctaccggccccggcctcccaaagtgttgggattacatgcgtgagccactgcgcccggccaatttttgtatttttcgtagagatggggtttcaccatgctggcaagactggtgtcaaactcctgacctcagatgatctacccgccccggcctcccaaagtgctgggattagaggcgtgagccaacgcgcccagcccgtacttttttttttttagtacagacggcctcccaaaagttctgagattacgggcgtgagccaccacgcccagcctgaatagagagagatttaacagtatgaatgaagggaggagtcaagaacagtttaggcttctcgcgtacatgattgggtggccccagatgtcattcacaagtataagccttggaggcggaacataactcgaagaagagcccttttgtgctccgcccatagcgtaggaaggtgtcaattggctgtttcgaggawcgcgccaaaaactgccaagggctgtgggaggtgtgttcttgcgtcatttccgagagacttccgcgccgcagtttccctgcttccccagctccagaacttccggccagcgcagccattttggcttcctgaccttgggctacggctgaccgttttttgtggtgtactccgtgccatcatgtccgtcctgacgccgctgctgctgcggggcttgacaggctcggcccggcggctcccagtgccgcgcgccaagatccattcgttgccgccggaggggaagcttgggatcatggtgaggaacgggcctggaagagcgcgggaggcgccgtgggctgaccccttctgcctagctgacctcaggtggtcctgagaatgcctcgcgccccgcagcgtagcggggagcagcagtgccggtttgggcatgtctggagggcgcgaacgacggggacagtgcccgggcgacagtcggggctgtcggcgttaggtctttccccacagccccaggatctcgggtctggtcctgtcaggccctccctctcctgtcgcctcctcgctgcgccgcctcctgccgacttcttkagccgctctgagcccattttctcgttggttcactgggggatgcctgacgctgtcagcgacgaaaatggttgttactgctatttattttattttattttattttacttatttattttgagacgggttctcgctctgtcgccaggctggagtgcagtggcgcgatctcggctcactgcagcctccgactcccgggttcaagcgattctcctgcctcagcctcccgaatagctgggactacaggcgcgtgccaccatgcccaactaaattttgtatttttagtagagacggggtttcaccatgttggccaggatggtctcgatctcttgacctcgtgatccgcctgcctcaacctcccaaagtgctgggattacaggcgtgagccactgcgcccggcctgggagggggttttcaggcaaggaaggataggtatcgttttggagttactggcccatgcaaggatccygggtcttaacatacaggctttgctttttttgtttgttgtttgtttttttgagacggagtcttgctctgtcacccaggctggagtgcagtggtgcgatctcggcttactgcaacctccgcctcccaggtttaagccaagccattctcctgcctcagtctcccgagtagctgggatcacaggcgcccgccaccactcccggctaattttttgtatttttagtagagacggggtttcaccatgttggtcaggctggtctctaactcctgaccttgtgatccgcccgccttggcctcccaaattgctgggattacaggtgtgagccaccatgcccggcccagaccagctttaaaacaggtttcaataaatcctgcttcctgtcccttcctttaccatctggtggtgcrtttctccctgaaccctaaccccagctgtctctccttcctctcactcttccccctccttataactgaccctttacctcaagggttagcgtagctttggacctgctctgtctgctccgtggagcgtggattcctttaacgtgaggatgcggggcctcccacttgcctctgagtcctggctccctgagcggggctttctgctgcctgggaactgcaaggacttagagagcctaggggaatactgactccgaggtgccttctttcttgtgctctgtgtaggaattggccgttgggcttacctcctgcttcgtgaccttcctcctgccagcgggctggatmctgtcacacctggagacctacaggaggccagagtgaaggggtccgttctgtccctcacactgtgacctgaccasccccaccggcccatcytggtcatgttactgcatttgtggccggcctcccctggatcatgtcattcaattccagtcacctcttctgcaatcatgacctcttgatgtctccatggtgacctccttgggggtcactgaccctgcttggtggggtcccccttgtaacaataaaatctatttaaactttacttcagaaattcattgtgccttccctcctgcctgggctcatgcctccactggcactgggtggaggtgtggagaagagcgcccggctggctgccctgtggtaggttttgtgtgcctcagctggactcctcgtgtgcttctgtacctttaaatggtgcctggcttcctgggaagacaaagcctgttgtcattgtgcagcttttctggctcatcccctccagctcccttgtttgtgcaaagcccaatgggcgtgtatgtgtctgtgtgtgtgtgtgtgtgtgtgtgtgtgtctgtcccactggggctggatcttcagctagaagcctttcctctaaggggccagccttctctggtcttcctttttggtggacttcatttcttaggtgctggtgcccttcctaattgggggtagggactttgcagaatcttggcttttttttttttttttttttttttttgagactgactcctgctctgttgcccaggctggagtgcagtgatgcgatctcggctcactgcaacctccgcctctcaggttcaagggattctgctgtttcagcctcctgaggcattacaggcacccaccaccacgcccggctaatttttttttgtatttttagtagagacgaggtttcaccatgttggccaggctggtctcgaactcctcctgacctcaagtgatccacccaccttggcctcccagagtgctgagattacagccaccgcgcctggcaatcttgcctttttaatttttttttcaagacagagtcttgctctgtcacccaggctggagtgcagtggtgtgatttcggttcactgcaacctctgcctctggtgttcaagcaattctcctgcctcagcctcctgagtagctgggattacaggcacatgccaccacacctggctaatttctgtattcttagtagagatggtatttcaccatgttggccaggtctcaaactcttgaccttgtgatccaccctcctcgtcctcccaaaatgctgggattaacaggcgtgagagaccgctccgtgcccccgctttttttttttttttttttgaggctagactgcagtggcgcaatcacagctctgtagccttgactttgactgcagccttgacctcccaggctcaagcgatcctcccaccacaggttgtaccccagtagctgggactataggcatgtgctaccaccatgcctggctagtttcatcttttttttttttttttgagactgagtctcactctgttgcccaggctggagtgtagtggaacaatctcgactcactgcaacctccgcctcccgggttcaagtgattctcagcctcctgagtagctgggattacaggcgctcgccaccatgcccggctaatggtttttttttttttttttaagtagagatggggtttcaccctgttggtcaggctggtctcgaacttctgacctcgtgatccgcccacctcggcctcccaaagtgctgggattacaggcatgagccactgcgcccagccatacctggctagtttcttaaaacattttcttgtagagatggggtcttactatgttggacaggctgatcttgaactcgtgggctcaagtgatcctcctacctcagcctttcaaagtgctgggactacaggtgtcagccactgcgcctggctgcttgcttttttttttttttttgagacagagtctcgctctgtcgccaggctggagtgcagtggtgtgatctcggctcactgcaacctccgcctcctgggttcaagtgattctcctgcctcagcctcccgagtagctaggactacaggcgtgtgctaccacgcccagctaatttttgtatttttagtagagatggggtttcatcatgttggccaggatggtctcgatctcttgaacctcaatatctgcccgcctcggcctcccaaaatgctgggattacaggcgtgagccaccgccgccggcccctgcttgctttttaaatgtcaactccagggcccctttccttctaacactttccatacatggttatggactaattgtctttcttcattctatctgccagcttccctttctcctcctctgtttgacttggggaatctgccattcctctgtccccaggagtccttcctcagtgattctttctcctggtgtgtgaggggcaggaagtacctcagcaggggcaatgttcccaaacactgcacgctgagctggagtcctgattgccagcatctggaaggaatactcggacctgccgggtcccaccctcgaggaagacatggctttacctctcctttgcatcctctttgctggggtgacttggttgatttctgaaaagacacaggttcagtctcccctgtggagctgaggctgccaggacgcctgtgcctggaacagtgggcaaagatgtcaggtgagaggggagggctgtggttggcctcaggccctgagtgtctgaacacacgtcttcctagctcctgttctgcaggttgtttcctgatttatgttgacagagctgagggtggacctgactctcctgccgtagcctggtcttgcttggcttttctgcgtgatgcccagggaagcctgtggggcccagtgcctgataccgtactgggtttagctcctgccatagctgtttccctgagcgttaggaaattgtcctctgcctcctaggtggctcctttccttccacacaagccagactttgtatatgaggctgaagggtcagggcctagttggagggccggggagaagctgcctgggcctgttgcccctagtggggttcagaatgctgcaggtgtgcccggtgggagcatcggccagggaggggagagcctatgttggatctggagccaggatggggtactgacctaggagaatccacctgccacatacaggtatcacaacaggtcccttgtttctggatggagggtcctcatggccatcttccacacaacaggaccaccccttgttctgtgcatggttctgggaggcttttctgcttacattagtccctgtggaggtgggacctgagcgccccctgactgtcctctcaggcccatctcctggcctggctggcagctccctggccctggggaccagccactgcggtgtgggaggccggggcattcccaccaagcctgcacttcttgagtagagggccctgagtgtcctggcccttggttgactcagggctgctttcctctggctgtgggcacagatgaggtgctggtctcataaccacggggctgcacacagcaaggacgtggcactggaaaaagtgtgatcttgagtttttctttttttttttttttgagacggagttttgctcttgttgcccaggctggagtgcaatggcacgaccttgggtcattggcaacctctgcctcccgagttcaagcgattctcctgcttcagcctcccgagtagctgggactacagacatgcaccaccacacccagctaattttgtatttttagtagagatggggtttctctatgttggtcaggctggtctcaaactcccgatctcaggtgatccacccgccttggcctcccaaagtgttaggataggcatgagccactgtgcccagccttcttttctttctttcttttttttttttttgaagacagagtcttgctctgttgtccaggctggagtgcagtggcacgatcttggctcactgcagcctccgcctcccaggttcaagcaattctgctgcctcagcctcccaagtagctgggactataggcgcaggccaccacacctgcctaatttttgtatttttagtagagatggggtttcaccatgttggccaggctggtctccagctcctaacctcaggtgatcctcctacatggacctcctaaagtgctgggatcacaggcgtgagccactgcacccagcctgttgtcttgagtttcttttctttctctttttctttttttttttttttgagatggagtcttgctttgtcacccaggctggagtgcagtggcgccatctcggctcactgcaagctctgcctcccgggttcatgccattctcctgcctccgcctcccgagtaactgggactacaggcacccgccaccacgcctggctaattttttgtgtttttagtagagatggggtttcactgtgttagccaggatggtctcaatcccctgacctcgtgatctacccgcctcagcctcccaaagtgctgggatcacaggcgtgagccaccgcacccagcctgtcttgagtttctatggtaactccactgccctgctaagggtttgattgggtgtcctccatttttgtgcccctggaattgaatgatgggtgctggtccccctccgaggaggactgctccagcccaaagtttgattgattgagccactgccccaacctgtgcaacaccaatggctccaggcaagtccttcaggaccctggtctgaagaagccctcagcaagcccagcagttcctccagcccctcttcctcccacaacctgccatgtcctgcatttgtggggatgggtggggtgatgtacgtaggggtgggcaggacagtgtagagtttgagtgacctatcacgtttgaaccccaaactccttggtcccctgtgtggccattaggtctgaaatccggtcttccactggcctacccttgtccccaaccaattcagggccctggagcaattctctatagagaaagcaaggatccttataccccaaacattttctgtgtccacatgtgtgggtttctgtgcctggtgtgcatgctgactggagaggctaaagtcccggcaggtgctgtaatgtcaggaacagtggtctgggagtggggaggcttgggcttgaggcctggcatggccactgaactgtacgaccttgggcaagtcatctggtctctgaatctcagttttgtaaaatgaagatattgtggcagacagaataatggccccccgaaaatgcccatggtctactccctggaaccagtgaatatgttatcttacatggcatgggggctttgtagatgtgaataaggtcatgaccttgaaatgaaaggctatccttggagatccaggcgggcgcaatgtcgtcataagtcctgaagtgagaagcacttagcctaccgttgctggctttaaggacagaggaagcgggccatgagccaaggactgcaggggcctctagaagctgggaacagccctcctttacagccagcaagaacatggggaccttggtcctaccttctgccaacccgaacgagtaggaagtggatctcctttagagcctctggaaagaaatgcagcctgcagacaccttgattttagtctggtgaaacccagacttctgacctcctaaagtgtaagagaggctgagcatggtggttcacacctgtaatcccagcactttgggaggctgaggcaggtggatcacgaggtcaagagatcgagaccatcctggccaacatggtgaaaccctgtctctacaaaaaatacaaaaaattagctgggcgtggtggtgggtgcctataatcccagctactcaggaagctgaggcaggagaatcgcttgaacccgggaggcggagcttgcagtgagccgagatcgcaccactgcactccagcctggggaaccgagcaagactccgtctcaaaaaaaaaaaaattgtaagagaataaatttgtgttgttttaagccactaggtttgtggtgactcgttacggaagcaataaggaaagtaatgcatcatgtggtgctgtgaggccctggggagggtctgggcccagctgctgggaccgtctgcaggcataaagtgaagtgaatgtacagcacttacagtgggtgccccagcgaggactggggtggtgggagttgcttgggaggggctctgcctgcattgcctctgcccctctgcttgctttcggccttaggaggtctgaatcctgcaggtgactcacagcccaacttatggccctgaggcatagaccctgctctgccgcatcagcctttgct

SEQ ID NO: 95319 - DNA, 48678 bp, Homo sapiens
ctaggtggtgccctctagcttctgtctcccagggaggtcttacctgcatggtgtctggtctcctcaactgggtctggcagaacaacttctggccaaggtggtgaactcagggatgttttaggaacatatctgtaaaacacatttcgtagacaaatgtcacaagcacctgaaaaggcagctcaaatcctctaagaaatggccacacacaaatgttaggaagggatccccggcaacaaaaggctcgctctttcggacaggccccgcccctctggggtaaccccgaggacaggctccctgtatccttttagaaccacagggaacaatggctcatcattcaataatcaaagcaggaactctcattgttctgcaaaagagccctcacttgggtacttctcagtgctggaagggtgcccatccaagaaggctgggcttgtggtgtcttggggcacatttatcttggaggcacaggctgcctctactttccccacaacccaggacacagggccagcagctctcccgcctcccttggcatccagtggccctggaatggcagctccaatgacccttcaccacatcctgctcaaacaggaccatgacgttccctgctccacctccacctcctcctaggtaggtgcctgctcttccttcacacccaggtgagtgccaggcagaactggctcggaaccccagacaattctgtgtcctggtgtctacaactgagcaaatgggaaaacaagcacccgcctgaaagggctgtgttaggtattagatggctactgttcacagccggtcccagcatggccagtgagggtcgggtgttaggagtgctcagtctcagcagctatagcactgcggtccccagccacttcccctccccaccstcaggatgccaagcttggtgcgggcaatgccttttttttttgagacggagtctcgctctgtcacccaggctagagtgcggtggcatgatctcagctcactgcaacctctgcctccagggttccagcgattctcctgcctcagtcaccttagtagctgggattacaggcacatgccaccacatctggctaatttttgtatttttagtagagatggggtttcgccacattggccaggctggtctcgaactcctggcctcaagtgatccgcccacctcggcctcccaaaattctgggattacaggcatgagccaccgtgcccagcccaagatcttcttcatttcctaactctcccctgcctgctcagcctcaggtaggtggaggggagaggaagggaggaaagaaagaggggggcctagattcaaaaggaggtggggtctttctttctgtagtctacaaagagggagggtaggtagatcccaaaccgaattattcagaaccgtttttaagcttttattgctgctgccactgcaaagtaaaatttcagtctttctactccagggttgcattaggaggaagaaaacgacttgctccatatgcaaaatgcaccggcctccacaccaaagaccaggcccacccgtcctgttggctggcgcgcaggaggggctccacaccaatctgggagaggaatgaatgctttcccagtggggtagggcttggagctcctagagacatgaactccgtgatctgtggttggtcaatgaccttgagagacaaggaggacaaggaaggtgctgctctctacaaaacgtctttgacctgtttgatgtctagtctccccatacgggttcagcagtgcccagtgtgagaagaacacgctggcaggaaggtgctaacctctcacacaggacacaggggtagtaggcacaacctacccacatgctcacttacaacttcttcctatgctcagaatgttttgccgcttctttgagaagcaagaaagactcccacatctccccactgcagaggatccctggagtcccagcagcagttccagcagccaatgttttgtgagtgctgactgtatgccaggcactgttctaagagctttaaatgtatacatttacttaatcctctccaacacccatgcagatagaaatgaacattacttccatcttgcagaagcctggcgtcccaggctgtgaggggcagccggaactgcaccccgggggggtccctacagtaactgctatccctgcactgctcctgtgtctcccaccagtgagtggaactttgtcgaatgttttctgcagtttatgatacctaaaaatgttttctcaagtataaaattttaacactgaatgtgctttttcaaataatgagtttctcttagagactctgatacaaacttcctcatcagaaatcttgagttaagacttcaagctcctccataataaaagagagcaaacacatacagaatttctctttggtctcttgcagttacgtcttcttttaagggtctcagaaaaataccgtcaaaaaagttaaagctgaaagtggtggtgcatgcctgtaatcccagctactcaggaggctgaggcgggaggaccactttaggccaggagttcaaaaccagtctgggaaacatagtgaaactctgtctcttaaaaacaaaagaggaaatttaaatattattgagaaccaaaaggtaggaagttttgactttagaaagatggttctacaaatgaaaggaaaagaggcaccaaaacccacattttgatattaccctggtagatatgaagtgctctgtgaattgaaccttcgagaagcagaccaaagggaggctgagggaagaagagaaacacagatcattaccattaatactacaaatgcaaactgccctttatgatgctaaatgcacagctgctgctcctggtacatggtatgaaccactgcatgacagcctgcccacagaaacacctaggtgagcaaaactacaagaacgtcacttacagctactggttatatgtgttgagatcagttagccacatcatctacaagcgcctgagaccagaaccacccgtccactaactcatgccttgactaagtgcctggtaggttcagactctgatctgtgcccaagcgtgggagcagcctccaagatggccctgctgggccccgcctcctgctattcttacccctgttagccccctgggagtggcctgtgtgtccaacagctagtgacagacatgctagcacgtggcttctgggatgaggtgataaccaactgggacttccatcttggatgcctgtgctcaccctttctgatctctggccttagggctgccctgctgtgagcagccctacctagaggtccacatggcggggaactaggcctatcgccaacacccatgggaacgaccttgcaggtagattctccagccgctggcgcagtggagtcttgagataactacagcccctgcagacttgcttgctgcaagctaagaccctgagccagaaccagccacttaagctgcttctgtgttcctggctctcagaactggtgtgagttaataaatgttttaagctgctaagttttggggtaatttctgatgtaaccgtagataacgcatacaccaggaatacaccaggaaacaaagacattcaatctactgagaagacaggggatcaaaataagtgcttaggtgtaaaaagcagagaacagtttctcaataaccacttttaaagaaactcagctataatttacacaccataaaaaccacctttttaaagttcacccattagcaccagctccccatttgcatctcctcggctgctttctcctctcctctcccatttgggcatccggggctcaacccttggccttgacctcctctccgcccatggccattcctctggtgactgcatccagtccgatggatttaaacacccccaatgtgctggtgactcccaagtttacacctccagccagggcttctctcctggttttgcatacccacctatctatctgccttagccactcgtgtctgacgagcacctcacacctccagaggctcctcatttcttcccatgcctgcttctcccacactcctccctctcacatgagggcaacttcatcctcccagttgctcaggccccaaacctccatcagttttgactcttctctcgcacactactcagtcaacccattggcaaatccatcccactattaaaaacttagcaggcttctgtacctaatttgcttctagctttgtttttgggtccccagggaacaaacagtctccttcctctcccacaggatttcctttaggtagtcctagagactgtgactgtgtacttccatcacgtctcctttgctcactcttcaaggccccagctgctcactgttttggtcaccttgtctctactcgcttcactgtgtgtctttctctcctaaygcgtgagtctgtacttgaacatagcattggaggggtggtttcatgtaggtaggtagaatggagtaagtcccactgcttttgtaaaaactttcctgcctacttaaacctaagttttattatggaaaatgtcaagcatacaaaagtaaagagaacagaatagtgaactctctcaattatccctttccaggttcaacagttaccaactcatggccaattttggcatctacattgcctctggcccaactctgtgattattattaatttcttaatagactttattttttagcacagttttagtttcacaccaaaattgagtggaaggtacagagagttcccatatgtcccctgtccatgtgcccacagcttcctatcaacatccctcaccagagtggtacaatctttacaattgatgaacctacattgacacatcattgttatccaaagtccatagtctacattaggggttcacccttggtagtgtacattctatggatttggacaaacttataatgacatgtatctaccattatatcatacagaatagtttcactgccctaaaaatcctctgagctccacctatttatccttttctcccccaatcctcttaccccccatgtaactttttactgtctccttagatttgccttttccagaatgtcatagtgggaaacatacaagatgtccccttttcaggttggcttcttttacttagtaacatgtatgtaagtttcctccatgtctcttcatgactcatttctttttattgctgcataatattctactgtatggatgtcctacagtttatgtaaccattcatctcctgaaggacatctgggttgcttccaagttttgggaattatggtactattcttttaatatcgtccaatatagagttagatccagttttccatttttgggggtcatggtgagacatgaaacccaggtttaaaacatacataaacactcatgcacacaaatacacactccaaccattttcaagcagagatttatagagtttttaacggacataacctttttggagcctcgtatcagcccagcgccttaaatacggctgtttcttttgcagaatgagttcagattaggcgaggatatccatcaccatttttcagaccagctcgcagcctgggggcagtggttcaagcacaggctttggagccgaaatgactgcgcctgaagtactcttcttccacttccccgctgtgtgaccctgggcacgttacctagctcctctgagcctcactcttctcccccataacatagggcctataccaaagttcaagggctattgtcagtattcaggctactaactgaaggaatcaaaatctgaacctgggttcccccgactccaaaacccgtgctatattcaccacaaatgcgatcaacacacaaggcaccaggtcggacccaggcacatacgtggcgagaccgcagggagcagcgctcgctctgcgtcctcccttcctcccatatcccaggtctcacctgctccgggccccraaggtctcaggatgctgtggctgcacgcggacgccagccgccctaaggtgaccgtcagggaagatgctgccatggccgccgccatcttcccgcagcctcggccggaaacggaaacgacgcgaaccgcgtgcgtaacgcacgggcccggcggggaacaccggyccgctgtaacaccggcccggcgcagaagcgggacgtcggcttctaggggcccaggccggcggcggygatggcctcggcagctgtggagagcttcgtgaccaagcaactggacctgctggagctygagagagacgcggaggtggaggagcgcaggtacgggaggccgccggcgccgctccctcgcggtcggtcccgccgtgtcccgggcagagtctccgaggggctcggcctcatagtctggggcgggaatttcgtctccgacccttcgagtcaggggcagggatcgtccgtcccctgcttggccacctcccgagttgtcagtctcatcacttcctgggcagcgcgttccgtttggggacccttaagaagcactttgatttcccgacccgagaycccccactaagcttacactcctgggccctggccccgaccccagttccacccgcagcgagttagcagccctttcccttattcattcagtaaacatggtttgcgcccattctcagtcaggccccggcagcatgagtcaggtgcactggctgcccccgatccggccagcggcgggctgggcataagcagagagtcccttcccctccagtgcgtccagggccggctgcgtgcgtgtcgcggggaaagagcctggaggaggaaggcccttccctggggagggtcatggtggcttcaaggagggagtggtgcctgaaggaaaattggagttaagctggtgggtgcggrgtagggtggggagccgtcctgagaggtgtggggagccatgtgagagccgggcttgtttccgaatgggactatttacttgtccaaaacaatcagagctaacacttacgtactttccatgcgttaattcttttacacctcatcccatgccaaccctacagtgtaagtttcttttttttctttttcttttttttttttttagacagagtctctctctgtcgcccaggctggagtgcagtggcacgatctcggcttactgcagcttccatctcccgggttcaagcgattctcctgcctcagcctcctgagtggctgggactacaggcgcgccaccacgtcctgctaattttttgtatttttagtagagacagggtttcaccatgttggccaggatggtctcgatctcctgacctcgtggtctgcccrccttggcctcccaaagtgttgggattacaggcgtgagccaccgtgcccggccgcagtgtaggtttctgttactgtcattttccgtctaaggagatggagacagagaggggttaagtaacttgccccggggtgacacagtgtagcccgatttgctgtcaggcagtctgcttccagagtttgcagtcagccatatgtgggtaggatttgtctgagatgcttttgatcatggcaatggagagcttttgcagttatgttgagtttcttagaatcccagctgtttcatttatgsctgtgtgactttgcaggttctgtctctgagccttacttacttcatctgtaaaactgggatgattcccacctcacaggcttgctctgagaaygaaacgatcccctgtcagtcaggtgctcagcgtggtgccaaggacagagtcagcccccatggcagtggctctttctgaggatgctgagcagactggcagggcgagcctgggaagggcctggctaaggagctagtcttctgttctgtgtatgaaggatgggccatcagcggggttaagcaggtgagggaggcgaatagctttgcattttaggaggatttcttgggtctcctgcttttgattggacgtggagaggccagaggtaaggtagttgagaggctctgtttagtccaggtgagcagtgatgtggatttgaaccggggctgtggcagccaggatgagaggcagagaagtccaggtagaaatgggaggggcctgataggacttagtgacagatgggaggagagaggggaatgctgattgaaagatctgtctcaggtaactgagagaagggttgtggcattaactgccctagggggatgtaggagragcgggattgggagtggagccaattcggagttccattgggacatatttagtgcctgtgagtagatctttatctatgtttctttctcttttacttttcctgggtgggtggaagtagaaactagtaaaaatcctgaagcatcaataccgggtgtcttccaggtcctggcaggagaacatctctctgaaagagctccagagccgaggcgtgtgtttgctgaagctgcaggtatccagccagcgcactgggctgtayggacggctgctggtcacctttgagcccaggcgatacgggtccrcggcagctcttcccagtaacagctttacttctggtgtgtgcgtattgacctagacagacattgaaatttactggcattcagaccgtgacttgtaccctcgtaaagactggattaaaatgaccagttggagaataaagcgttgcaatgaagaactcttaatcagaagtccaacaattgatgtgggttttagttgtctagatcagcgttgtccaaaatggtagccattagccatgcgtggtcatcaaatgtttgaagtgtggcttgtaattgccgcagatacagaatacacaccaaatttggaagattatgttaaaaaaacaattgggaatatcttgagtaatttttctgaatactgattacatgttgaaataatatttttcatatattgggttaaataaaaaatatcttattaaaataatttacccatttcttttctttttttttttttttttttgagacagagtttcgctcttattgcccagtctggagtgcagtggcatgatctcggctcactgcaacctccgcctccggggttcaagtgattctcctgcctcagcctcccgagtagctgggattagrggcatgcgccaccgtgcctggctaattttgtatttttagtagagacggggtttctccatgttgttcaggctggtctcgaactcccaacttcaggtgatccgcctgctttggcctcccaaagtgctgggattacaggtgtgagccagtgcacccagcctcttttaaatttcttaatatggctactagaaaacttaaaactacacgtgactgggtgcctgtaatcctagcactttgggaggccgaggtgggtggatcacttgatctcaggagttcgagaccagcctgggcaacgtggcaaaaccccatctctgcaaaaaaatagaaaaattagccagatgtggtggtgtgtgcctgtagttcctgctacttgatgggctgaggcaggaggatcgcttgaacctgggaggttgaggctgcagtgagctgaaatcacgccactgcactctagcttgggggcaaagtgagaccctctctcaaaacagacaaaaacaaaagaaaaactacatgtgactctctttatgtttctatgtaatgggcagccttggtccagctggtaaacatgcaggatgtgtacttctgtattcccaaccctttcttgtgccaagcatgctttggctaaacttgtgccagcctggttggaaaggagggacagttagaagaagcttcttaaccacacgcctgggatgcttgtgttagacaaccacagccttggaagcctggaggaagcagcgttgccagggctgtactttttactatggaagtgtctctgccttgttttggtggtgacggagttttaaatttcatattttgatttcgtagactttagcccaacaattactggaatactggctggatttggagaagatgagatgagggtattgagagaggagagggccaggaggggaacctgtaggttggagtcagacctgagcagagtttgagattttttttttctgagatggagtctcactctgtcgctcaggycggagtgcagtggtgcaatcttggctcactgcagcctcagcctcccgagtagctgggaccacaggtgcccgccaccacgcctggctaattttttgtatttttagtagagacgggctttcactgtgttagccaggatggtctcaatctcctgacctcgtgatctgcccacctctgcctcccaaagtactgggattacaggcgtgagccaccgtgcccggcctaacttactttcttttttttttttttaactgttactgattgyatttactaaagaaagtaacaaagataaaatatttgaagtatagtggattttattacagaaaatgatattgaagctttccccagtgtcttgtgtcactgagtctttgtttttgcaggtgatatcgtgggcctgtacgatgctgctaatgagggcagtcagctgkccactgggatcttgacccgggtcacccagaagtcggtcacggtggcctttgatgagtyccacgatttccagttgagcttggaccgagagaattcctacagactgttaaaacttgccaatgatgtcacttacaggcgactgaaaaagtaagtggatgggactggaaatcctaagtaccatcttccttcaacacagctaatccattcttacatgcctgtcgcacaaaagagagcaacaagtcatggtgtgggtgtggccctcaygggagttkgtggcagcattggggcagaggctcgggcactgaattgcaggtgttctaattttagttttctcccttggcagagccctgattgctctaaagaagtatcattctggcccagcctcctcactcatagaagtgctctttggcagatctgctcccagtcctgccagtgaaatacgtaagaacttctgagttttcttttttggttgaaatcactactgaaagtatagagaacagtgtgaccttgggccgttttaataagagtttgagaaagtatgactagaagaagtctccctgaacatctttgtaggagtgtctcggagggccttgcatgaactggaccgtcctccttgtactcagtcctaatgaactggctcgttccattgaggttttttttttttttttgagacagaatcttgctctgttgcccaggctggagtgcagtggcgcgatctcagctcattgcaaactccgcctcccgggttcaagtgattcttttgcctcaacctcccaagtagctgggactacaggcatgcaccaccacgcctggctaatttctgtacttttagtagagatgaggtttcaccatattgaccaggctggtctcgaactcctgacctcatgatccacccgccttggcctcccaaagtgctgggattacaggcgtgagccaccgtgcgcctggccccattgagtttttagttaaaaaaatttttttttggtggggggggtgagggggggggcggatggagtctcgctctgtcacccagactggagtatagtggcatgatcttggctcactgcaacctccgcctcccgggctcaagtgattctcatgcctcagcctcctgaatagctgggattacaggcacacgccaccacgcctggctaatttttgtatttttagtggagacagggttttgccatcttggccaggctgttctcaaactcctgatctcaagtgatctactcacctcagcctcccaaagtgttgggattacaggcatgagctaccgtgcctagcctccattgagttttaaaataatgttctttttagtgtatataaatcttttattttgaaatgtaatgatatttcttttagcttagtactttgtgaaaatagaggaaagctgatcatactttatgcttgatagcaattttaggttggaaaaatcttttttttttttttttgagacggagacttgctctgtcaccaagagtggggtgcagtggtgcgacctcggctcactgcaacctccgcctcctgggttcaagtgactctcctgcctcagcctcccaagtagttgggattacaggtgcccgccaccatgcccggctaatttttgtattttttagtagagacaacatggtttcaccatgttggtcgggccggtcttgaactcctgacctcaggtgatctacctgcctcggcctcccaaagtgctgggattacaggmgtgagccaccgtgcccggtctgtgcactttttatgtcctttgctgttcttggagaacgtcatttttgggaggagtttgttgtctcatccagtcactgcccatgatttaacagtcctgtgagtattggacttggcccatttgtaaagcggtggctttggccaagcctcatgcaagggttaccccacagctattttctatcatactgtgctaggcaagccagtgttgtgttagcttcaaacacacaggaygactttgtagcactctttcagcatgcagtccctcaagatgtgttgtttttaaatactcattttctttctgcattttcctttggaaattctaaatgcagtcacatttcagtaatgctttatttctatgaaatatttactgaagggctcctatgcgtcacaaactgaattagaaatgtatttactgtgtcttagggactctggaatggcttggctagagcacgggaacgtggggttcaatggcctgttactagctgcacaccctgccgtcttccatgttggcttcagtctcacaagtcagggtcagcaaacaccctttgcttatgagctgctccttatccgataggcgtctctgtgtagtgggcaccatgtagcgaatgccatggctgcagggctgagcacagcaccacctgctctcaagagcacagcataagaagcaggtcttggccaggcgcggtggctcacacctttagtcccagcactttgggaggctgaggccggcagatcatgaggtcaggagatcaagaccatcctggccaacacggtgaatccccgtctctactaacaacacaaaaaattagctgggcatggtggcactcacctgtagtcccagctactctggaggctgaggcaggagaatcgcttgaacccaggaggcggatgttgcagtgagctgagatcatgccattgcactccagcctgggtgacaagcaagactccatctcaaaaaaaaaaaaaaaaagaagcagatctttagtcttggtcgtggaagattcaaaatagaaacacgatcctagaatttgttaatcattgtttttgtcatttgtctttatcattttatgggcactttaaagagggacattatgttagaaaggaatatgctctaggaaacatttccttcattcctgttactctagagcaggggtttttcctgtaaagggatggattgtgaatgttttgactctgtgggccatatcatacgtaccgtctacagctgcctgctgtagayggtatgtaaatcaatgggtgtggctgtgctccagtaaaactcaccaaaaccggcagctgactggatgtggcccacagtttgcckattcctgttcaaggagaaaccttgtgaaaataaagcagacttaattttgtgttgattgggttgccyctggggaggtccggcgtgttcctgacaggcatcactcatcccccggggcacacactctctgaggaggaacacccacagagctccccagagcacctgagcctcacgctgctgcttcttccacagacccgctgacattcttcaacacctgcctggacacctcccagaaagaagcggtttyatttgcgctgtctcagaaagaacttgccatcatccrtggacctcctggcactgggaaaaccacgactgtggttgagatcattcttcaagctgtgaaacaaggctkaaaggtgggcagtgcatgccacttccctgtcagagcccgtccgctcctggtctgttgtgttcagtgggtgctcagcgacctttcagcctcagttctggtgggatgggtcaggaacattactgagcatttattgattgagccttggactgcccctgtttgatttccagcatccccgtgagtcttggggagcacgcgcaggagccgtagcctgggttgttgaggaaggctcctggagccctttgaggcgtggcagccttcgtgtcggccaggccctgggtcagggtttatttgttcaccacgcttgctgtgctcgtgctcctccgtgtgcacgcccgtgcaggggcctggagttggcctgggcccggtctgtgcccgtcaggagctcagcgtctggttgaggtgttaacagctaatcagatagtctggttaatggatacgatgcacatgtccagtgcacagatgaatgattttctgagatgtggaatataacattgtacattattattcacttacattttaaattttttttatttttattttttggagacggagcctcactctgtcacccaggctagagtctggagtgcaggggcgggatcttggctccctgcaacctccgcctccygggtttaagtgattctcctacctcagcctcccgaacagctgggattataggcgtgcgccaccatgcctggctaatttttgtatttttagtagagatggagtttcaccacattggccagtctggtctcactcctgacttcagttgatctgcctgcctcagcctcccaaagtrctackattacaggcatgagccactgtgcccggcccagttacatttttaatggctgaaaaaggatcttttatcatcatctgcatcagcttgagtcattgtggatcttggcacatggagagtttttttttttttaatttatttatttattttyaattatactttaagttctagagctttttgaaaaaactttctggtttataaaaatgttggataatgatgagaattggaataatggccagttttgtagtttgatgtttactgggtgctgcctaccaccaggcatcgttctgagcacccatttaatcctcactgaaaccctgtgccaaggcaggtggttagtggccccagtttgtagacaaggaagccgggtgtggtggctcacacctgtattctcagtactttgggaggctgaggcgggtgggtcacctgaggtcaggagttcgagaccagcctggctaacatggtgaaaccccgtctctactaaaaatacaaaacaattagccgggtgtggtggcacacacctgcaatcccagctacttgggaggctgaggcaggagaattgcttgaacctgggaggtggaggttgcagtgaaccgagatcgcaccattgcactccagcctgggcaataagagcaaaactccatctcccaaaaaaaaaaaaaaaaaaaaaaaaccaaaaaaaccacgaggaaactgagaaacaaggtcaaatgcccagcactcagagtggcagagccagcaatggaactcgggcagagcgcagggaagcctgtcacttgcttaaaagattacgtccagcggttttccaatgtgtgagtgtctttgcacatgtttgaaaactggtaagaaaagatgacttattggaagggagcagattggtggttttaattgggtgccgactattcactaaaagtgagccaagacacacctgtgtgcacgctttggtggagatatgcctttggacatgccagtggggttggaggcgatgctgggcatagagagtgggtggctgagcctccttcctgagctgctgtttgttttgagcttaagggcctgtagagactctgcctcctctgctggttgccacctcctcttttttttttcctcagagatggggtctcactatgttgtccagggtggtcttaaactcctgacctcscaccttggcctcccaaagtgctgggattacaggcatgagccaccgtacttggccagcgtctcacttttaatagtggagctgtggctgggtgcagcggctcatgtctgttatcctagcgctttgggaggccaaggggggaggatcacttgaacccaggagtttgaggtcagtctgggcaacatagcaagacccagtctctacaaaaaatagaagaaattagctgggcatggtgatgcatgcctgcagtctcagctacttgggaggctgagccaggaagatagcttgagcccagaaagtcacgaaacaccaggagtgtggtctaggtcttgctgctcgccacacagaaagccagttactgaggacaagtattgccaaggaagaggctttataatcagatggtgcagccgaggagatgagagctcatcctcaaacccatctccctgactaaaactaggggtttatataacagggaagaaatgtagcaatgtgtaaaaaacaggaactagggagggcaaggaggcacctgtagtggtctggtgattttcagatctttgatatttttttgagaggcctcaatgtccttttctgaggaagaaactcacataaataagtttgaagctttaacagcagrtggtcaatttctctttatccaaaaacaactgtccatgggactattgagccggtttctccatgatcctgccactgcgctccagcctgggccatagagcaatttgtttcaaaaaaaaraaagaaagaaagaaaaatatagtggagctacagtgttcgggagacaactgtgagtccatttgaaacgggaagggttcccttgtccccctcgcagggcgtgggatgggggagtggctcgcttcttcagtgtcctgctgctcagacctgcaggggagcatacagatgggcaggctgtgggctctgacctcatggcagtgtctaggggtgaatgtttacagctctgkgagttacaggrtgctctcttagtttgccgtctataggtggcttatgttaaccaactcaattagatccccttccttgtcacaaggacagagggctttctgtatcctgggttcttgccttggggtaccggaagaatcggatcacacgtgggcttggaaaatgaatgcaagatttgattgagagcacgtgtgtacatgccttgtgcttctttctacctttaaggctttttgttgttttagtgtcaacttcagtggtttgattacaaagtaaatgaccagatcctaacttgcggttcccaggttctgtgctgcgccccctccaacatcgccgtggacaatctggtggagcgcctggctctgtgtaagcagcggattctgcgcctgggacaccctgcccgcctcctggagtccrttcagcagcactccctggatgcggttttagcgcggagcgacagtgcccagattgttgcagatatcaggaaggacatcgaccaggtctttgtaggtgtcatggccagtgtccatgtggggcgtgggcttctgatctgcagtctttttaaggagcaaatttatctgtctgcattcctcttgaccttctcttgcttctgtcgattcctttaataattttaaaaattgggctgcccttttttttttttttttttttttttttttgtgacagagttttgctctcattgctcaggctggagtgcagtggtgcaatctcggctcactgcaacctctgcctcctgggttcaagcgattctcctgcctcagcctccctagtagctgggactgcaggtgcgtgtcaccacgcctggctaatttttctatttttagttgagacagggtttcatcatactggtcaggctggtcttgaattcctgacctcaggtgctctgcccgcctcggcctctcaaagtgctgggattacaggcgtragccaccatgcctggcctttgtttttgtttttttttttgagatggagtctcgctctgtcacccaggccggagtgtagtgctgctgtcttggctcactgcaggctccgcctcccggggtcaagtgattcttgtgcctcaccctcccaagtagctaggactacaggcatgtgccaccacacccaaccaatttttttatttttagtagagacgggggtttcgccatgtgggccaggctggtctcgaactcctaacctcaagtgatccacccgcctcagcctcccaaagtgctggattacaggtgtgagctactgtacccagccagggctgcccatttttgatagagaactatacttagcatttaacagagtctcaactgtcttcagagcacttggttagtaggtgtgaggaattgtaaagaaaacattttccggccggatacagtggctcacacgtgcaatcccagcactttgggaggccgaggtgggcggaacagttgaggtcaggagttcgagaccagcctggcccacatggtgaaaccccgtctctactaaaaatacaaaaattagctgagcatggtggcgggcacctgtawtcccagccacttgggaggctgaggcaggagaatctcttgaacctgggaggtggaggttgcagtgagccatggtcactccactgcactccagcctcggtgacaaagcaagactccgtctcaaaaaaaaaaccaaacattttcctgggtgtctttctgtctggtcctgttgtcttgctagtagtggcaatgggagaaaagtagcctgaacataaacattgaaaaaattggcatcctcctagagctttccgtccattccaccttctccttgtgaaagaggacaccagtcggctggagaagtagggtggtggtaggtttcttccatttgagagggccttttccccccagcccgacactccgacacttttgagctctttggttctcccgtggacgctttgttgtagtgtctgtgctcacgtcctgtcctgtgtgctcactgtcggtactggtactccttggtgtcttagtctcagaggagtgatggcagcagggagggtgctggagccagtctttgctctaatgtctgtgctcacatcttgtcctgtgtgcttacggtcagcacctgcaccctcggtgtcctaacctcggaggagtggcggcascagagagggtgctgggagccagtctttgctatgggcccgtggcatcgaggctgcttgcgtggctgcttgcatggcagcgtggggatgggccgcctgctgggagggggaggaaggatagatgcatgtcatgcaggttcgaggtggtggaggaatatgcatgatgtttgctcatcacaaatgtgggtgatttcatttcctgttgaaattggtgcttttgaggattttctttctctgtaaattatacacagtaaaatacctcctgtcacccctgctaaaactccatcccccaaagtagaaatcacaaataaggaaaggttacatctttttttttttttttttttttttttwaaaraatcttgctctgtcgcccaggctggagtgcagtggtgcaatctcggctcactgcaacctccgcctcctgggttcaagcaattctcctgcctcagcctcccgagtagctgggattacaggcacacaccatgcccagctaattttttgtatttttagtagagacagcgtttcactgtgttggccaggctggtctcgatttcctgagctcgtgatctgcctgcctcgggctcccaaagtgctgggattacaggcatgagccaccgcgcctgaccagttccatctttttgagatattaaagtaagttgaggttttgattatgggttgaaaaaattttttttaatctcttgaaaaatgtagaataatatgtgaagctcagtctctcyattcgtaagctcctacaacccaaatcctggggcggrcaagcgctttttcttccccaagatcaaatgcctgtgtgcagggcagggctggtccaatttctggtctcctctgagttaaaaacgtggtctctttccaggacttaaaatgtctcttcctgtgacttcaaggcaagtgaggatgtaaggtgcttagttgcgtgtgtgtatctgtgtctctttcaaggaagatttctgagtgttttttacggagtttattgaactggactgaatgatagaagcacttcataaatagagttgaagaagtacaaagttggactgaagtaagtgtatctcctttgtttttctttataggtgaaaaacaaaaagacccaggataagagagagaaaagtaattttcgaaatgaaattaagctgttaagaaaagaactgaaggagagggaagaagcagctatgctcgagagcctcacttcggcaaacgtggtccttgcaacaaacacaggtgagggggcgtctccatcctgcctgtgtggcctcgaagaaggagttggggtgtgttccctcttctgttttctggaagagtttgtttagaattggtatttctttcttaaaagttgggtagggttcactagggaaggcctccgtacctgcagttttcttcatggagaggttttgaactacaaattcaacttcttcaatagataaagggctgttcaggttgtttttcttccatgagcttgtagctttcaagaagtttgtccattttatctaaacggttgaatttagaggcatgaagtggttcctaatatgcccttattcttcttttactgtctgcaggatctgtcatgatataacctgtattattcctgatactggtttgtgtgctcttttttttcctgctcttctggctggagggttttttttttwaaatttagattttatatatacatacatatatattttaagagacagggtctctgccaggcgcagtggctcacacctgtaatcccagcattttgggatgccaatgcgggtggatcacctgaggtcaggagtttgagacctgcctagccaacatggtgaaaccccatctctactaaaaatacaaaaattagccaggagttgtggtatgcacctgtaattccagctacttgggaggctgaggtaggagaattgcttgaatcctggaggtggaggttgcagtgaaccaagatcgcgccactgcactccagcctgggtgacagagcaagactccgcctcaaaaaaataaaaaccccaaaaccaaaaaaacaaagcaaaacaaaaaaagagacagggtctcactatgttgcccaggctggtctcaaactcctgggctcaagggatccccctgcctcagcctcctaaagtgctaggattacaggtggacccaccgcgcccggcctggctgsaggtttcaattgatcttcccaaagaaccagcttttgctttttctctattgtttttctgtttcatgtatttccacattgatctttatcgttttctgttttcttgggcttgttctttttcttgcttcttaatgtagaagctgagatcattgatttgagacctttctttttttctgatacgagcatttagctccataaatgtctccctaagtactgcttttgtggcatcccacaaattctgatctgttatatttcattcatttcaaaatgctatctcatttgccttttggttttttagaagtgttatatagtttctagatagttgggaaatgtccagatatctttctgttgttgatctctcctctcctctcccctcccctccccgtccccgtccccgtcctgtgtgggatctcactgtgttgctcctctcctctcctctcttcttctctcctctcctcatccctgtccccatccccatccccgtcgccttccctatccccatccccatatgggatctcactatgttgcccaggctggactcaaactcctgggctcaggtgattctcccagctcagcctcctgaggagctggggctccctgcatgtgccactgcacctggcttactttctgttattggtttctaatttagttccatgtggtcagaggacatactctcatgacttggatagttcatcgagacttactttatggtccagaatctggtctctgtctttgtgagtgttccatgcacacttgatagaacgtgtgttctgattttattgagtgttctgtaagtagtcagatcatgatggttgatgatgtggttcaagtctgctgtattgagagagggacgttgaaatctctgaatataactggacatgtctgtttttcctgcagttctattggtttttgcttcatatctttggaaactcttttactggggtcataaatgtggggctatgttttcttgattaattaacaaatttatcattatgaaatgaccttctttatccctgataatattctttttttgaaatctactttgtctgacattaaaataatcatttcagcatttcagcttgcttttcttttcattatggtcaaaaacctgtaaaatttaccatcgtaaccctttttaagtctgtagtacagtagcattaattgtatgcatgttgttgtacagcagatctctagaacattttcatcttgcagacctgaagctctggatctgttgaacagcaattccctttttccctgtcccagatcctggcagtcaccattctcctgtctgtttctaagaattttattattttacatacctcaagtaagtggaaccatgcaggatttgtcgtcttgtgactggcttgttttatttagtgtaatgccctcatggttcatccatgttgtccagctttctttttatttttaagagacagggtcccaatctgtcacctaggctggagtacagtggtgcggtcaaagctgtactccagccttaaccatgaatgtgggacctccagcaatcctcccacattgacctcctgagttgctgggattaacaggcgtgagccattgcacccagcccccacctttctttcaactagtgttagtgtgatctatctttatcctttttcttagaacctatttgtgtctttatgtttaaagtgatcttttaaaaaatatttgagacacggtctcactgtgttacccctaactggagttgcagtggtgcaatcatggctccctgcagcctcaacctcctgggctgaagtgattctcccacctcagcctcctgagtagctgggacaacagacacgtgctatcacaccctgctcatttttttgatttttaatagagacaagatctcactgtgttgcccaggctggtctggagttcctggactcaagtagtccttccacctctgcctcccacagtgctaggattacaagtgtaagccactgtgcctggcctgtttatttctttttaaagagagagtcttgctctgttgctcagactggagtgcagaggcgtgatcataacttgctgtagccttgcattctttggctcaagtaatcctcccacctcagcttcccgagtagctagtactgtaggcatgagccattacacctggctaattttaaaaatgttcttttcttttttccttttagagatggggtcttgcaatgttgcccaggctggtctcaaactcctggcctcaagtgatcctcccactttggcctaaagtgaatttttttgtagatagcatatagctgggccttgctttattatccagtttgacagtttctgccgtttgttctttgttatattttcctcctcttctgctttcttttaattaattaattgaacatttcttttttttttttacataagttctcactatgccccatgattgaagatttcttaggaatttatttttatttatttatttatttttaaaagataatttatagagacaaggtcttgctgttttgcccaggctggtctcgaactcctggactcaggggatcctcccaccttggccaccttggtgctgggattataggcatgaaccatcactcctggcctatttttgtttttgttggcttgttagctatatatctgtatttgattctttcagtggttactttaggccttacagtatgtgtcttcaactcatcatagtctgttcatatgccacctcacatatagcataagggctttatgattgcaagctgacatttctctcctcttagcatttatgcttttgtcatatatttttcttatacgcatattctaagacttacaatgcttgttcttgttttaatggtgaattatctttaaagagatctaaataataagaaaaatgtcttcgtatttgcccgtgtagttaccacttttggcgctttgttttcttttggtttaggtcgtgtatttccacgtggcatcattttccttccacctgaaaggcatccatgatcatttcttgtagtgtgggtcagccggtgatgcagtccartagcttttgtatgtctgaaaatatcttgtttcacctgcagttttgaaagatatttttgctgcgtgagaattctagattaacacttttccttgcaatattttaaagatgttgtccactgtcatctgcctgagtatttctgaagagaaattggtcatccttatccttgttcctttgtatgtaacgtgtcttttttcttctgtctgcatttaagattttttcagccaggtgtggtggctcatgcctgtaatctcagcactttgggaggcttaaggcgagtggatcacctgaggtcaggagtccgagaccagcctggcccacatgtactaaaaatacaaaaaaattagcagggtgtggtggtgggcacctgtaatcccagatgctcaggaggctgaggcaggagactcgcttgaacccggaggcggagattgcagtgagctgagattgcaccactgtactccaacctggacgacagagccagactccgtctcaaaaaaaaaaagaaagaaaatgatgctttctttatcactggttttaagcaatttgactatgatttgccctggtgctatttgcttcatgtttttttttgagacagagtctcactctgtcacccagactggagtgccgtggcgcaatcttggctcactgcaacctctgcctcctgggttcaagcgattcttctgtctcagcctctggaatagctgggagtacagatgcacaccaccacgcctggctaatttttgtatttttagtagagacggggtttcaccacattggccaggctgctctcgaactcctgacctcgtgatccgcctgccttggcctcccagagtggtgggattacaggtgtgagccaccgcacccggcctcatgttttttaacattgtggtgagaacacaacatgagatctaccctcttaaatgtttaagtgtactatataatattgttaactatagacgtcgtgttgtgcagcagatctatagaatttatcttgcacagctgaacctttatacttgcttattgctgagttcactaatttccttctttcatgcctaatctcacatctgtcccatccagtgtaactttcatctgacatccagaaataagagtctttttatatctttgatgttcttatttaatttttttaacatttggaatacaactataataactgttttgaatattctagactattatttctctatcacctgtgtcatttttggtctctttcgatgaactgttccccttgagtggttgtgttttcctacctttttgtaggcctgctaatgtttgtttggataccggacattgaggattttacgttgttgcatgctgaatattgaatatttttgtattcctataatctttttttttgtttttttgttttgtttttttgagacagcgtcttgctctgtcacccatgctggagtgcagtggtgcgatcttggctcactgcaacctctgcctcctggattcaagtgattcttttgactcagtctcccgagtagctgggactacaggcatgcgctaccatgcccggctaatttttgtatttttagtagaggcgaggtttcaccatgttggccaggctggtctcaaactcctgacctcaagtgatctgcctgcctcggcctcccagagtgctgggattggtgtgagccaccacgcccagtctcctataatattcttgtgcttggttttgggaagcagtaaagttacttgtaaacagtttaatccttttgagtcttgcttttgagatgtgttagggtctggatcagtgcttagtccagggttaatattcccctgtactgaggtaagaccctttgagctttctacccaatgcaccctgtatcatgagatttttgagtttgactggtgggattaggtgctgttcccggccttgtgtgagcactgggcacttttctctcattgttttggatggtatttttcccaggcctggagtagttttctcctaagcatgtgctaatcacaatacccaagggaatctcgcagcagatctctggggttttttctctctgtgtagcagtctctttggcattttgtcctggaaactctgcctgcattggtcgccacagattctcagccttgtctcctcaactcagggagccttctaggttctacctggctgccccttctctgtactctctcctggaaactctcaaggcagaaagctggggtaaccccagggctcacctcctttgtctctcgttattcaggggttacttttctttgttacctgttgtctagtgtcctgaagagtgtggtttcagttattttaaaaaaattttaaataactggctgggggggttgttatttgagatgggagagtaaatgcagtccctgctattccatcttgggcagaggtggaggacrcacattctctcttgtagccaggagagagcactcccgttacagagctgtgtaccttgtgactgttgtgggaatcttgtcaaccactcttttggggtttaggaatgtgtttgtgagacctctggtttgttcctgtgtgataatagtaccacaaaggtagcagctgaaaacaacccacgtttattattctacagtttatctgggcggagagcccaggcccggctgaacaaggtgctgtgctcaggatctcacaaggctgcgatcgaggtgtcagtgggggctgcagtctcatctgaaacttgcctggaaaggatctttcttcaggctcacgtggttgttggcagcattcagttccctgtgggttcttgctgggtgttggctggaggscgctcttagctgtttgcccttaggccttgccaacatggctgcttgcttcctaaaagccagcaagagacayagtctcctagcacaatgggttatcgtcttatgtaatgttatcaagggtgtcacatctcatcacctttcccctgttctgtggattagaagcaagtctcaggccccacccacatttgaggggaagggattatgcaagatgtgaataccagtggccaggatcctggggcataccttaaagcaagtttgtctaactaaaggcctgcaggccacatgtagcccaggatactttgaatgtggcccaacacaaatttataaactttcttaaaacattatgagatttttgtctctgtgttttttttttaagctcatcagctattgtcaatgttagcatattttatgtgtggcccaagacaattcttcttcttttaatatggccctgggaagccaaaagattgcacatccctgccttagagtctgtttgccacaacctctcagctggtgggctgctctaaggaacagagtccaggttctttttttttttttttttttttgagacagcatctcactctgttgcccaggctgtagtgcagtggcacaatcttgattcactgcagcctcctcctccygggttcaagtgattcttgtgcctcagcctcctgagtagctgggattgcaggcgcatgccaccaggcccagctaattttttttgtatattttgtagagactggatttcaccatgttggccaggctggtctcgaacttctgacctcaaatgatgtgcccaccttggcctcccaaagtgctaggattacaggagtgagccaccacacctggctagattctaattggctttgtagttattgctttatccagttgtgttttaaatcagacaggagaaaaaargggtcacaagcagaaaatacatttatggggtcttttatatctacccatgtagttgcctttatttcttcatgtagatttgagttactctctccaaaggactccctttggtatttcttgaagggcaggtttgctgtgacagattctctaagctcatctttatctgggcatgtcttagtttctccttcattttttgaaggatagtcttgctgggtatagaattcttggttgacagtctttcagccctttggacgtgtcattccattgcctgcatactttctgatgggaaagcagctattgatctcattgagggctccttatatgtgacaagttgctactctattgctgctttcaagtgtcgtcttttgtcttttgagtgtgtgattatcatgtgttaggtgtggatctctgtgagtaaattacatggagtttgtggaccttcttggatgtttagattsgtgtttttcatcaaatttggggagttttcagccattattttttcaggtattctttctgcccttattctactctcgtctccatctacaactcccattatgaatcagttgattcacttgataatgccccacagatctctgaagctctgttcattttcctccatttttttctttctgatcttcaggctggatcttctcaatggacctctcttcaagtttgctgatcattctctcctgttgaatccttctagtgaatttcagttattgtacttttcaactccagaatttctgtgtggtgcttttttttttttttttttttttttagatggagtctcgctctatcgccagactggagtgcagtggtgtgatctcggcccaccgcgacctctgcctcccaggttcaagcaattctcctgcctcagcctcccgagtagctgggtctacaggcgtctgccaccacgcccagctaatttttgtatttttagtagagactgggttttaccatgttagccaggatggtctctatctcttgacctcatgatctgcctgcctcagcctcccaaagtgctgggattacaggcatgaaccaccatgccagcctctgtgtggtactttttaaaaaattattcctgtctctttattgatattctcttatttggtgagacattattctcatattttatttctttagacttgtttcccttttgctgtttgaacatacttagaatcgctgatatttcaagtctttgtctagtaagatcagcatctgggctttctctagtatccagtttatttatttatttatttaattttttggagatggagtctcactctgttgctcaggctggagtgccgtagcgtgatctcggcctgctgcaacctccgtctcctaggttcaagcgattstcctgccttagcctcctgagtagctgggattacaggcgtccaccaccacgcctggctgatttttgtatttttagtagagatggggtcaccatgttggccaggcaggtgtcgaactcctgactcaggtgatctaccaaccttggcctcccaaagtgttgggattacaggcgtaagccactgctcctggcctcaagtatctgttgattgccttttttcccctgaatattggccatattttcmtgactctctacgtgccttgtagttttttgttgaaaatggatgattttaaataatagaatgtagcaactctggaagtcaggttctcttcccaccccggggtttgttgttgttgccacttgttgtttgtttagtgacttttctggactaattctgtaaaatctgtattttttgtcttgcgtggccactaaagtctaatacaacttagtggccagctagtgattagacagaaatccccctgaactcctggagccataaatgccccagtctttgctgagtggctctgtgtgtgtgcttgggcacacctccaacacagagccaggctgtttgtgactctcagctttcacttcccgtttgtgcagtgcgttgagctgagccacagatgagagctgagggcctcccgaggtctttcctgagccctgtacawgtgtgtggccttctagattcccaggaatatgttggagcttttcaaagccccctgaggatatctcattccccagcttaaaactttggttatcctatcatttgctccgaccattattctctgtcttagaaaactgtgatgktcaacaattacctctgattgtttttgacagacaccaccagggaaaaggctgtttgtattacatgagctcagataaagtcttttgagtgtggtctaccagaggattcccagacagatgagataagcacagtttctggagtggggcttttcaggaatgccaaccctgttctgcaccccccggggctggcaggtgctggttttcaccctgacttcaggctgagggtttcaaggctgccatagggrtggctgggaatagggcaggtttcagtgccaccgagctcccgtgctgacggggattcagatgcttttctggaatgaacacttccctgattgctgcagcctttggcgagtttccagagttctgagaaagttgattctgaccatttgccgatgtcttgttgctttcgtggaggagagaattctcagagcttgtgagagtctctttgctgacatccttctctggcttcaaggacagcacttgctggaaatcaggaggcatcccctgagccccacaaggtcagcttgtggcctttgtggcctttctgttccctgctggttgttggggaactagagtgagttcctggaagtgcttctccatcatgaagtctggtttctctctgtactgtgaagtcacatctgtgacctaaacatgtctcttaattatccaaagcccagccaagttctgtctcctctgtgggtgctttttctagccatctctgaagagtcaatcttgagaaatttctcagtatgtcttcatcatggcattatgtacatatcattagcataattcactcagatggaaggcagaaagggtgggaactaacattgatcacatttatggaaacctgccttctcgtgctgggcactttatatatgttatctccctttgtggtgcaatctcatgacatgcagtcattgtccatgtttgtgggtgaggaaacaggcttaggggtgggaggctcgcctgaggccccacactgttggctggagacagcgtggggcctgagtcttgctcacagcctgaacgctgcactctgctgctccgcgtcccaggaaggaaaagctgctgcagtgggtttgtgttgccaaatacatggaggcttttttctgggtgagtgcccagcagttgattgttctgtatgtccaagaaagtcaccttagaaaagaattaggttctaaatttagaaaataattgagttacaatatttagaactcagacagcatcccttgggcttggggtcacagccccgaaggggtgattaattttgccaattgaagatcagaggggcctgtggccagagtacccactgcttaagacacaggtgagctggaaccatgagttttaaaatgtcttggccaagtttttattacaagatacaaatttatcccacacagttgcaatgcaagccttgatgaaaccccagcttgatggtgtctcctctggtgtggctgcgctgttgggaagcagctgtgcccctggagactcccggctccctgtttccaccaggtgcgtctgccgatggccccctgaagttgctgcccgagagctacttcgacgtggtggtcattgacgagtgtgcccargccctcgaggcgagctgctggatccccctgctgaaggccagaaagtgcatcctggygggcgatcacaagcagctgccccccaccacagtctctcacaagtaagacccctttgcctcacatgcccttctctgccccygccctcctgcggtccttccacgctcagccaggagccccaggctcaccaggagcccctgcggtgcctcctcggtttctcggcacagctcctaccccgtcttacagcattcattcatctcaacgtcgcatctgtgagatcatgtactccccgagggtggggtcgcatcaccttcatctttgtagcttcagaactggacacagggcctggcacgtttctggtgttccgtccctgcttgttgagttgaatatcccctcatgaaccaggcaggtttgatggtagagtgccgtgagagccttgggctgggctaactggcctctgggtggatgtgggttctttagtcttcaatctgtagacacatccctggatggagggcactgggcagagactcagcaaaccatggttctgccgtgcggagacaccggagccctgatgcagtggcctggcccaggctgtcctggtggagacactggagccctgatgcagtggcctggcccaggctgtcttggtggagaaagtgctgcccgcccccccagcccccctctcacctctccccatactacccagcactcactgcttcagccacacaggcctcgctggcccctctgcctggaccactcctgcctgggtgtggcgggcgtgccctctctccagatgaaccctctgcatggtatcccttgactgcccttacacgaggcctgtgaacagggcctggcacgtgggctgtccttggacaagtccctgttcagaaagttgtccctgaggaatgaaacacttctgagactcctgcatcctggccctcacttccaccgggggaagattgatttcttcagatttcggttgccttttgaaacacttctctgtttcactgtgggtgtgtagaagctatgaactcggaactttcgttgttttccgaggaccggaagaagatgtgcaagaaatcctgtcgagtagaatctcatcacaggggcgtgggcagcccaggagttggcgggtatgtagagagaggtgtcaaaaatagtaattgagagtgagctttgggaggaagatgttggaaataaagatggtggaagaaagaggagtgctgaggaaaggtgctctgaaagatcgtcctggtgggagacacatggggatctagagtggaaatgttacgggatctctggggtgttgatttttctggctggaaacctctgcggccgcagcacctttgcctcagttcttgtcctgcatccaggaagaatgaggtacgcagattagtgaagggtgaagaacagttttatttagtgttagaacagctcagagtagtgggtagctcctctctgtaggcaggtcatccgtcgagtgttcagctgtcagcagaggaggccctggagagggtggctcctctctgcaggcaagtcacttggacatctctgcaggtctctgaagctctcagcagagagcatagatcctctctgccctctccgtcctctggctgtcctctcgccttctctgactgagcccagggcttttatggacctcaagagggaaggaaggatgtgccaattggtccatgggtggccatgggygggcctggaataggtaccatgagtcctcactctggtccacaggactggcagcccagctgccagccttcaggcccttcctggccttccactgtccccttccactcaggactctgtctgcctcccgctgccattcatggccctggggcttggctccaatcccactctgagatccgagtgggtgctgggmgctgagagaggccaggcagtggaagcagacacccatgaccctgcagggatggtgtgggggttgtccttcctggggcgcctgagggtgcaggctgcagaktgggagggcagctacagctgcacccaagagctcccgacccaccacctcagaagaggccaggctcctgcttgttcccggctcctgcctgcttcgtggagcaggaagcccaggtctgcagccacagatctggcggctgcagctgcacgcggaaaggcagatcctacctgttcccggctcccctaagagcaccgggagacgcagatccacagctgcagtttgggcggctgtagcccygcccttctggagcaggaggcctgggtctgtagctgtgaccctgtgtctgggctgcagcggccactctacctcagaaggggcggggctcccactggcttcatggagtgtgcagccacagccagggttccctgctgcagccggcatgatggcagcagccactgccatcagaacctccctgggagcagggaggacaggcgtgggaggaygcttattcagtggcttcttccagggagaggttctcgagatgtccttaaaggaggtcttcatcctctggaaagcctttgggtggaggaagtttggaactgtgcccttgagcagggaccctgttgtgtaggagggagtaggatggtttcgggggaagacgttgggtggcgttccctgcagagagtaggatggttttgggggaagacgttgggtggcgttccctggagagagtaggatggttttgggggaagacgttgggtggtgttccctggagagagtaggatggtttcggggaaaacattgggtggcattccctggagacagtaggatggtttcggggaaaacattgggtggcgttccctggagagagtaggatggtttcgggggaagacgttgggtggcattccctggagagagtagaatggtttcgggggaagacgttgggtggcgttccctgcagagagtaggatggtttttgggggaggacgttgggtgacgttgcgctgagtgttttgggtttgcagttggtactgatcatcgcgtcctgtcctcattttgttggaattaaaaatacrttaatcacagaggtctggtaagtttccagagggaaggtctctgaagtggagctgggtactgccccagggttttggtggggttggtgagccgtagtggtgcagagggtgggctctggcaccaggtggcccgggcaggtcctggctctgcagctcacccgggcagctgtgggctggcagcctcctctgtctcacccttcttacatgtaatatgggagtcataacagtagccacctcatgaggttgttataaggatgaagggagttaatccacatctggcacacccagcagtgcctggcgcctgggcagtgctcagccgctgcagccgttcttggtgggagtggacttgactgctcacagttggagcatgttggagtgtgttcgttccctgttatggctgtgacaaatgaccacaagcttagtggctgacaacaacagattttctgacctccagaaacgacaatctgggggtcagatgtccaaaatcagactcaccggcttaaaatcaaggtgtgggtggggttgcttcttctggaggatccaggggaaaacccatctcctggtcttttccggctcctagaggccaytgcttgacttgttgccctttcctctgtctatgaagccagccgtgttacgtcttcaaatctctccyctcggtgaccttctctgactgaccctcgcatgcccccttataagacccttgggttatcacctgggtcatccagggtcgcctccccatcccaggatccttaacttcatctcagctgcagcgtccctgttgtcctgtaagggaacattcacgggccttggcgattggatgtaggtgcctttggggctgtgattcagccaaacccgccccttggttacttctgggtcagaatccaggggagagttgggtcctgaggtttggggcctgtcctcctcacttsctgtggttcacacctggactctggggctcaggmctgccttccccctttctccctcctgggcgcagggctgcgctggcaggactgtcactcagcctgatggaacgcctggctgaggagtacggcgcgagggtggtgcggacactgacggtgcagtaccgcatgcaccaggctatcatgcgctgggcctcagacaccatgtaccttgggcagytcacagcccactcttccgtggcaaggcacctcctgaggtgagtagctcggcaccrcccgccgccccatccttctgccctggctaatcctctgcgtcacctgtttctacgcagcaagctaaagtgaagctttctgcatgaaagtcgactctgaggctagctttttggaagagagggtggccttgccctggagagctgggtcaggccygctccctcccttctgatgtcctgatgtgctcattgtcctcccctacctaagccttttcctcgtgggaggggtcggttctgttgggtggggcctcagtgctgcactgtggccccctgatgtgctccctctctgcctgtgtgccagggamctcccaggtgtggctgccacagaagagacgggtgtgcccctgctcttggtggacaccgccggctgcgggctgtttgagctggaggaggaggacgaacagtcgaaagggaaccctggtgagcttgcttscagatggccagcttttttgtttaaacatacctccagctctttaaaaataaaaggcactttaattgcctaattccgggaggagctgagagcagttgttgatggccgtgaaaaaacggagccccacactgcaagaggctgagcagcatcgttttctccagggtgagcagaccgctcytgggtgagaygggcctggcagcattttacggccttctcctgaatggtggcccagctctgcctggctggtctggtgatgggaactgtcattgctcagctgacaccascatctccccagttccacgttgaacaggatgcacggccataggagtcaaaaggccttcattgctgatgtgaaattcaagttagytgggcatggctggtcctggggccctgggacacagatgattagctcccaggaagccayctgagtggaggatcagctggccatgatagacagaaacgtgcccgaaacacgtgttggtggtggatgcccacttggggcgaccttgtgctgctcacccgttctttctttccctccaggcraagtccgcctcgtyagtttgcacatccaggctctggtggacgctggtgttccagcccgtgacattgctgtggtctcgccatacaacctccaggtacgagggtttccttttgtccctctacagagcagctggggctcacacaacctagagggtgaaagaaaaagggtgatttgttggctgtggtgaccgaaaagttcaggggtagggctgaccttattgtgactggatccagggcccaaatgatgtcgtcaggggcccctctgcgtgttcgtctgccygccccaccttgccccgccctgcccggtgccccagccttctgcactggcttgtgttctggccagatttgctgggtgaccccggcagcctcaggctgacacagtccttccacgggcagccctggcggaacagcctgtccttttctggcatttcccacaggagtctcagccttgagccttgctggtctggctcaggtcgtgttcccatgcgtatctcatttggtaggaaaaatgtaccttctggagtatcgggaggatctgtggaagtggccatcataccttcctggtgtgcaggcatcacacatagggctgtctgaggctggcggctgtcataagccaaaagaaatgatcaaatgccagggacagggtgtggtattggcgtgcatgcgtgcccgtgaggagggcgaacgggaagcctttcccyatggggctccygcaggctccgcttcccaggtcctggctgtttcacagcgtgaggccctctgctgagctgaagggcagggtcttgctgcgctggcatgggtgggtgaggaaaccacagcccggctggtgtttcaggtggacctgctcagacagagccttgtgcacaggcaccctgagcttgaaatcaagtctgtcgatggcttccaaggccgagagaaggaggccgtgatactgtccttcrtcagatccaacaggaaaggtacggagccctcgccagagtcctttggggacagcacagaagtgaatttattgattgaggggcatattgggtgtctgctgggtgccacactggtttctggcagtgtgctcatggtgcascttctgtccttagtaagttcacgtcaggcaaagcacaggcaagagagtctgcagaggctcagaggcgtgagtgtgctgtcagggagcaggtggctggggtggcagctgggggcgcagggtgggctgggaatgatcaggacatcctgccgaggaggtgaagccccctgcagcccagagctggcctttagcctccatgcacggagccgcggggtgtggtggtcgtggctgyggtttctgtgctgcygtggtgtgtgrgctttcccatttgggatgagcattgttcccagaagcaggtttagtgaacgggctttgtgagacattctcagaaggcagaaagcaggtgaggcctggctagaagctatgggggaaagaagggaaggtcctggaaggtttcttgtgctttctccctggtgccagctgcagccacaccccaggcggcccctgaggctgggcttagaaggaaaggagcgacagaacccagtcgggttccccagagccccactcagtcagccgtggcagccagatgccagggcaggtgtggcatcacggtgccacgcgtggccgggcacccgtgtggatggtgggccacgcgcaggggactacacttttggtggtggttactgataagggcgtaggagcctgactgtgtttcttagtctgaaacctgcttctcactcmcctctggccttttgtaggtgaagttggttttcttgctgaggaccggaggatcaacgtggctgtcacccgtgcccgacgccaygtggcggtcatctgtgactcccgtactgtcaacaaccatgcatttttgaagaccctggtggagtatttcacacagcatggggaagtacgcacggcctttgagtatcttgacgatattgtcccagaaaactattcccatgagaactcccagggttccagccacgctgccaccaagccccagggacctgctrcgtccaccaggaccggaagccagcggcaggagggaggccaggaggctgcagcacctgccagacagggcyggaagaagccggctgggaagtctctggcctctgaagctccatctcagcccagcctcaacggaggcagcccagagggagtggagagccaagatggcgtggaccacttccgggccatgatagtggagttcatggccagcaagaagatgcagttggagtttcctccttccctcaattcccacgacaggctgcgggtccaccaaatagccgaggagcacgggctgaggcacgacagttcyggggaagggaagaggaggttcatcactgtgagcaagagggccccgcgaccccgagcagccctgggacccccagcagggaccggtggcccagcccctctccagccagtgccccctacccctgcrcagacagagcagcctcccagggagcagcgtggcccagaccagcctgatctgaggacgctgcacctggagagactgcagagggtcaggagcgcrcaggggcagcccgccagcaaggagcagcaggcctcagggcagcagaaacttccagaaaagaaaaagaaaaaagccaaaggtaagtcaactaataagaacttggggcagtgtcccctcactggggtgctggccccacttggagcccacctgccaccatcaacagaaggaagggcttcctcctggtggcaccgtgcccgtgtcattttagctttattttcagtcatgccactcccagctccgtctgggctcccctaggtcggtgatcaggtcacgggcaccttcttttcccagaccctgtgtgggactcggcaagtaggcagcactcagagcatgtctgcagcagcaggaggggcctggaagagcaaacatggatggctccctggagcccctcgggaatggagcgatcacggggtcccatgcaacatgtggccctggagggtggaggtcttgcacagcgaaagggtgcactctgcctggaagttgtcctgggcaaaatgctcagaaccacaggggctggctgagcgcaaaaccattcttgcccttgggccatgtggagtccctgggtgggctctgccccrtttgccacatcctgcattgtgcccaccccgcaggagctggctaggcgtgcagtgggagttggccaggcatacgctggcagagcgtgtagcggtcttggggaactcctgctactgccattttcctcagcaagagcatgcaggagttccagcttgcattgattcattgaattcctgaagcgaagctacaccagcacatgggtggctttgaaaggggcctcccagagcctggggctccagaggaattcactccccaaacctttgttgagcagctactgtatgccacgctttgtgctagaggacaggactgatgccacccctgcccccaggcactgacagggtagcagagggaagacacatgagctgctttttaattttttttagaattaatagagacggggtctcactctgtcactatgttgcccaggctagttttgaactcctggcckcaagcagtcctcctacctcagcytcccaaaatgctgggattacaggtgtgagccaccgtgcttagccatgaattgattttaaaaccttaaatgaggggccaggtgttgtctttccgtttgcctgagtgacgcgggtcttctccaggacatccggccacagatctgcccamggaggaggactttgaggccctggtttctgccgccgttaaggctgataacacctgcggctttgccaagtgcacagccggcgtcacaaccctgggccagttctgccagctctgcagccgccgctactgcctcagccaccacctgcccraggtatgtcggcctcccctcctgcgatcaaacagtggggaggggtggtgggttccrtctccaggaagcagaccctgggcagacttgttccagtcggaacagttagctccttacaakctccagataccttcagaaacagaaatcagacactgactcatgatcggttttcagcacatcagggcacaagcaaacaaaatgccttatttgctgagctgcagccacgttagtgggaattctgggcagagggaattttgtcccagtgtccttgggttctgtcagtggcctaatctggtctgtttggcataggggaggtgggaggcagagcctccagcccgtcatctgagctggccatggcccggctgctgtgtcattcattccttgagccggggttgatgagaaccccctgggccaggtgtgggcgcctgtggaaagccgaggtctgaaccagccttgtctctaccctggaggatgctgggcctggtgggggacctgggtaagagaccagcatacagtaccaggtgttgagtgctctgaggaagaaaacccagggccaggrtggcagcagggtcaccyacccagatgcagcagtcagggtgggcttcctggaggaagtaacactggagctgagacctgtrggacagaaggtgggagctgggctgggaaggacagggccgatggcgggtgggcaggcaggctatccacccttagaacatgcataaagccccaggcccagtcagagagttgggagtagagtgtgaggcagatggctagagttgaggctgggcatgtcctggcgagctgcctggaggagtcaggcctgatctgaaggcagtggggtaccctctagggtgtcagcagggctgtgatgtyaccagtcttggctgcagtgtggattaggtaggcggaggctgggaggcagtgggaagtggccgcagggacygtgtggtcagtcagggtggtgccatttcctgtgtgcacactcgggggctcccgccacaccagggtgcagaccaccccgccgctctcccrccaggcagcctgcagggtgaaggactgacatggcgggaggagtggccttctctgttggggcgcctgtggccccccagctctttgatrggcagagctgcaggatctgcctccttgcccctgtgagcccagcagtgattcttgtgtcctccccagatccatggctgcggtgagagggctcgcgcccatgcccggcagagaatcagccgggaaggggtcctctatgccggcagcgggaccaagaacggatccctrgacccagccaagagggcccagctgcagaggaggctggataagaagctgagtgagctcagcaaccagaggaccagccggaggaaggagagggggacgtgaccggccgcatccttgcacgccycgcggagctctctccatggtagcccagggcgctggcagaccatgctccrcctccaccagggccacagaggagcggaggggcctatgggggaggagcggagggccctgttggggaaggttgggtttttggaccccagggataagcttttcygatgtcacaatgtggaggaaagcacctgggggacaacagtgctcgtgcaggtggggcttgggaaatgcacgtcccttcccctyactccccgccaaaacccacatcccagcctctggatcctggggaaggttccagtccctggagaatacccagggcctcaaacttgaagtcactcctccaatgtctgggacttgccagctcagcccgttaggatgagggtgctgagaggaaacaggaaacaagactgcgaatggygctcaggcagggagcagggagtggcgtttggcttgcacgttcccatgtggccagatgctggggccactttccttctgtctgctggtgactgcagtgttccccctcctcctcaccacggggctcctgtgagtctggggggcacctctttctggcctgtgcacctctctctggcttataaaggtgcctggcctgtgccagcccctccttgttgcgcctcaccgtggggaccaggtgagcyggctctcccacgtggytgtcccgggaaagctgccccacagcctcagcatyttcagcacttaccgatccagagcctcccggccttytccggtgtcctgtaccaactcttctatttaagagaacctcagatgatgtacctgagcctcagggttttgtttcagagggatataaattatttaaaaattaaatgaaaacgttgcacactgccccagtgtgtctgctgcgggtctaaggggcgcgccctttgcctgttctgctcagctgctgtgccctccccgccgcgtctctcaagccccctctccttctgacctctctgcggcagactctcccggtgcaggctcctctctccttaaatcccattcatgtccttttatgtccccgatggttctgagtgaggttgagcttccctgacctgcacctagggtggctgtcccccagaggccatttacgcagcgcattcggctaatgtgtcctcaggccaggcctgcacgctttgactgccgtgttcttgctggtcctgggcgactctcccttcctacccggactgacgccccaccctgggccactagagcccctcctcctccccctgtcctgtccttgtctgttcccgtcaagtggcttttggactgaattgtttgggaaggggaccaggactctactgcattttgtgtcaagtgcggcagagttaatctggttgcttccataagtgctgagcaccatgcacagaaggctgcagttctcatgctctttgaggacccgtggctgtgggaggcatttgtgtaatgatgctcttgggggatgagggcaccattggaagcatctcccggttgacacagcacacagggacaggtgttcttcctgygggggcgggggtgcctgcttaagctccccaacttcccagaatccaaacagctgataagagtcctgccctggggttgacacggatgctgaaagatgttggctcttgggtgggagacagccgacagccacactccctgcctcctaggtagcctgtctgcaggagagaaggaggccaaagagaaacagacccaaaaatgggggtgggagagtgacctgatgacactgtttgagcacctggatgtagccatgcctgacctccaccccattcttcctggtgtcctgagctagtaaatccccttttttagctgaagaagtctgccttgggtttttgtcacttgctgccaaagaatctttgctgacccagtcatgcccacatctgtttatcttattgggcatacccctcccagcatggaggcagtatggaattagtgtcgccccactcattagagaaggcacgattggaatccaagccctgtacctttatccaggtgttcttctgtgggccgtcccaccaggaggagcttgaagtagaggaaggcagccagcatcagcggcgggccgggcgggtggggggtggaagcttctggaatcggagggacctgagtctgaacgccagccagcaccaccgtccactgaggtgtggcctcagcaagtcacctctcctctctgagcctgtttgtcatctatgaagcaggacgggaacagttgctgccgcgccagctgtgctaagtggaagacatgaagtgcagcatcacgtccttgcgggacctggctccgggtttgtcgtctccctggctgtgccccccagcctcctgcatggagccttctccccttcagcactgaccaccgcggcccttggtgatgcattgttaaaatgccagaacccaaggttgcaacataaaaagtttccatttctcatcccagagaggccttgttaggaaaatatttgtagctggttgtttgaaaagtaccctacagtttggcctggatagggtaacccaagaaaaggaaaaaaatttcccaagccaaacgtctccctggccagctggagtgtggtcttgctgacagtagctgcaggctgtagcccacccgggccggaaccgggtggaagagagtagaggactcccttctaaggagaactgcccacctccacccgtgcggctcccctgaggtagccccgccatgtgctcctttccgggggtgctgggcagggcagtgggcacaggcaggagcccctgccagctctgggctttgctcctgagtttacttgggatgtgctgcgtgccttggggcctcagtttcctcctctgtaacatggggaagtaacaagacctgtctcagggtagctgtgaagatgaaatgatcaaacacacaaggccttgggtacggcgcctggcttctaataaatgtattgccctcctcctcgtcatcttgcaaagcagcagtggagaggaacgagacggcacatgccgctatagaagggtttcagcaaatggcctttcctaccagagacagaggcaagagtgcccaggtcccaagggcccaccggtcagctgctggtggaagtcgcaggtcccccagtgtgggtctgcctggcttccttgcacccaacacagctcgcccccgccctgtgccgagcaggccaagggtgggccaagggcgggcctagggcaggcctgctctgtttaccttggtttgtttggagctgccccagagggatcccagagtgggctgaagggcaccacgctgctttgggaggttttaggcccacgttatagccctggcacttaaaaggaattgtggtcaccactgggagcatagcaaaagctgcagccttatttggtctggaaacttctttgcttgcaggaaaagcagaatggggaagcaggctctcgtgtgggtgggcagattggggccagttcttcattacccagggatatgaattactttgctacctcacttggctctggttttggcttctggccttctccactgaagctgcagctcacaatctcccccagccctcagctgccaatgagctgttctgttgtgcagctttattgaggtgtaattgtcatgccatagaatgcactcgttgtaaatatacgattcagattcgatgatgttagtaaacatggggctgggccacatacccctacccgtccctactgctgggtgctggtctgcagttaatctctgctcctgccctcagccccaggcagtcaccagtcagctttctgtccctataaatttgccttttctggaaacttcatataaatatagactgtccccaactccccgtggttttgacgtaacgattttttgactttacaatggtgcaaaggcttgtatgcattcagtagaaaccaccattctgtgttcatgttcagtacagtattcagtaaatgacatgagaaattcaacactttatattatcaaataggttctgtgttagataagtgtgctcagtaagcgttctgagcatgtgtagggtaggctaggctaagctacgatgcccaggaggtcaggtgtattgaaagcattttcaatctgcaatgttttcaattccccatggatttgtggggaacatattcccatcataagtcgaggaacatccgtatccagccccgtgcatctgcgttcttttacttcacctgatgtttttgaggtttgcccatgtggtggcgtgtatcagtgtttcagttctttttattgtcaaacaatgtcccattgtatggatacacccatttagtgtatccactcatctatcggatattcagattgcttccactttttggctgttttgacccatgaggctgctatgaatattcatcgttcaagtccttctgtgaaaacatgcattttcatttttcttgggtagattcttagaagtggaattgctgggtcataagttagtttattcatttaagaaactaccaggcttttccagagaggttacaccattttacattcctgccagctatgtatgcgggttctagtttttctgttcttgccaacatttggtattgtctgattattattactattaccgccatgttggtgggtatatactatgatctcattgtagttttaatttgcattttcttaaagactaaggaagctgagcacccttttcctgcgcttacgggacatgtagatatctcctttggtaaatttttcttttttttttcttttttttttttgagacaggtcttagtttgtagctcaggctggagtgcagtggcacaaacagggctcactacaatctcgacctcctgggctcaagggatctccaggctcaagggatcctccaacctcagcatccccgagtaactgggactacagacgcgtgccaccacacctggctattttttttttttgtaaagatggggtttcgccatgttgcccaggctgatctcaaactcctgggctcaagtgatttgcccaccttggcctcccaaagtgctgggattacgggcgtgagccaccacacctggcctcttttattattattattttcatagagacagggtcttgcttttttgcctgggttggtcttgaactcctgggcttaagccatcctcctgcctcagcctcccaaaatactgggaatatagcttttgctaagctcccagcagtgaccacaattccttttaagtgccagggctataatgtgggcctaaaacctcccaaagcagcgtggtgcccttcagcccactctgggatccctctgggcagctctgggattataggtgtgagttaccgtgcctggccctttggtgaaatttctgttcaaatcttttgctcatttttaagataaattgaagtgtcctattattgagatataagatatctttaggccgggcatggtggctcatgcctgtaatcccagcactttgggaggccaaggcaggcggatcacgaggtcaagagatcaagaccatcctggccaacatggtgaaaggccatctctactaaatatacaaaaattagcgggggcatggtggtgtgcacctgtaatcccagctactcaggaggctgaggcaggagaatcgcttgaacctgggaggcagaggttgtagtgagcccagatcatgccactgcackccagcctgggcgacagagggagaccctgtctcaaaaaaacaaaacaaaacaaaacaaaactttatatagcctggatagaagtcttttatcagatgtatgatatgcaaatattatctcccagtctttggattctttcaatatttccttaatattgtctttggaagtgcaaaagttttaattttttaaagtccagtttatcgattttttttcttttatggctgtgctttcggtgtcatgtctaacatctctttacctaaattgagatcacagaggtttttcctatgttttcttttagacattgtacagatttagttcttctgttcaggtctgtgatccatcttgagttcattttcatgtatggtattggtataaggcaagggccaaaggttggttggtttggttggttggttgttgcatgcggatctccagttgtctcagcaattgttgaaagactcctgtttcttcacggaatttccttggcatcgtgttaaatattgtttgagcataaatggaggggttcatttctgggttctcaattctgtgccattcatctgtccatccttacgctaataccacaggctcctcccgtccccatcatgagggcagccttctggtcatggagacattgcaagtttacacttagaggcacggcccccacaacccgtctctgactcagcgaaaatggaaagagttttgaaaacatatagccacactcaagataaacacccccgtgttccagaccacagagagaaacagggctggctgggtgcgatggttcacatctgtaatcccagcactttgggaggccgagacgggcggatcacctgaggtcaggaatttgagaccagcctggcccaacatggtgaaaccccgtctctactaaaaatacaaaattagccgggcatggtggcacatgcctgtaatcccagctactcgggaggctgaggcaggagaattgcttgaacctgggaggcggaggttgcagtgagcccagatcgcgccactgcactccaacctgggcgacagagcgagactctgtctcaaaaaaaaaaaaagaaagaaaaagaaacagctggccgaggaggggacgctgtggacctgctagggtcctcgtctggtcaggagcaggggcggcctggagccttttttcctgtgggcaaaaggaacaaaaacggccagttacgaagtgggatctgagccaggctctcactatgaaactagatggtaaggcagggcttt

SEQ ID NO: 95320 - DNA, 19350 bp, Homo sapiens
ggttcaagtgaagactgtaaaaagtggaaagggagttcgtgtgtcaatgccgacatccacatcccagcagagaatgaggaccccacaccccatgggctcattaattactctgggtgaatcacagcttccaatcacatgtgaagtaatgtggaactcagattcagtattcttatatcaatctctctcctcttctgttaagcattgggaagttaagaaaccatgccagctgcacagctgaaatggaaacacaaatagctgctatcaaggtgttggagacaccacagaatgaattatctatttccctaatggttacccacatgccatcaataatgaaaaagtgtgtattmatagtcctatgggacaaatgaacagtaactgcctatggagatgctggataataactggatggttcagacagcatctttaactaggatttaaatctgtatgagcagatagctcaaaaattataccaggcagctacttagtagctttttcatgcttgaaaatcttggcaaatagagtcaactctggcagaagtaaaatgagagattattgttactatggaagccaaccacaatttgttctgagattataaatatctgaaatgtttaaaacaaatccactagcctaaaactgtagtgatgttagactgataatgaaattcacaaagtttccaatttataaatgggcaatgttctaaaactttacctataaactagatggatgaaacttagaatatttgttttgtataaaaccagtgttatataacattgagtatgtgaaagtaagtacaactagaagccttactagaagtatctagattctcaggctagctcataaatgcatgtagtccctgtactggaaatactacatctttgcaagggatttcagcagaatatactgttgtaggagttcacaccatgtgaaacagaaacataaaatataataatgtattacaaaatctgtcatttgaggaaaaatatcttacttagaagaactagagcatcttttaagtccacacgaaaaaaggctatttaaaggtcttaagactttcctggggcaactaaacaaggattagaaagatttcagaatctgggtaatacattaaacagagaaacagaaatagattcccctgagataagttatgagaagagatcatgggaaaatgttagatccaacagtttcctgcacctatcactaagttatattgttagcccagggcaatttggttagtaaaccctcttatccacatgccaagaggtctttgatgtgcccaagaagagggcagtgtgccaagggctacctgtaggtacctggcttgctttaatcattccaagttaactgtcagtgggaggcagtgtggtgcaatggaaaggagacagtgttttgagtcatggtctgttaagagataggtagcttttgccaactcacttagcctctctaaatatatatttcctcgtatgtaaaaggaggatgaaagattaaattgaactactgttgagataaaatgtaatagtgtgttaagtgcagctacttctatgagacaaaatttaaattacttaattatgtactatagcagagtatgtgaaagtaaggacaactagaagccctattagtcctagatcaaataatggatatgattccctagaggtaccgtatctgaacacaggaagtaatcagagcaatgcactctttctctgttaaaaccaaactcaggtagtagatcctctagaaagctttccttggacccctattccytcctgccacccattccacattctgtagtttgtgcaaacttacgtggcagaagttactattacagcgtaattaacctgcttacacaggctgtgagttcctcgatgacagagacctcgtcctattcaactctacattttctgtacgcagcagtgcctgatgcatagtgggcctctattaacgattatttaattgagcagctgatgtcttaggtaggatatcatgacattaacactaaatcggcaatcaagaaatcttacacagtaaaataaaatttgatattttagtcaaagacgagtgatttccctaagcatgcatacaaataagtattgatccacgaaccccctcccgtcaaaagagatcagtgaaaaatccaatatcaacacacaaagccaatatactcatctctttctatccagttactatcacatagtaaacataaataagagttgttaaatggggacggacttttttttggtttcgataccttgggtagtaatactagtaattcattttacttaaatgttgactaaaatctacagcaaaattgacttcgattgtatggggtgcttttttgatgtttcctgaataaccccagaacttcctgtcatgatattcacaggtctaaacctgttactgtcgtgattagatcggggctctccctctctccaacctagtagctggaattattctattttacttttcatgtctgtgtgggagggtgggggagcggagggttggattttagggatcttaggtttgtacacattactggaaatacaattgacatagaacactaagatacgttttaggttccaattacaaaacgacacccggcgagcctctggcaatgcgcgcaccttagtttccaaaacaggtatttggcttcagtttgcttcccctggtgagtggtgagcggagtcggggcggccggcagggctgcaccccgggctggtcctccacaacccccggcgctcggcccccgcacgacccccaggggaagccgcactagccccggggctccccccacagcctcccgggagggtttcgcgcccgcctggaggagccggcggctccccgcgaccctcctagaaggagcggaccggcgctcgggccccgcgggctcggggtccccgagccgcacttactcagactcgcggacaggctgcgcagtcggccgcgggcacgaaaccgggcgccgcgcagcagcgtacccccgcgtcgcttccgtcgctcctcatcatcctcctccagcccaggggccgctgccggcgccacggtctagcccggagctcctgctgcgagctgtggccccacttccggcccccgctcgggtgtcgccggcaaatgcccccgccggctcccacataacctgttctccgtctccgctcccggagtgggaaccctgcccgctcttccgagcatgcgcagaagccgctgccagtgagcccccgcgacggtggcccggacggaaaagatacctcggcggcgtgggcccggctccctgctccaggacctagggatcttggccttccaccctcctccgagcaccaggactccctccagttccgtacccgaggcctccgtggtgaagaggtgccggacccgatgagctcgggagtccaccatcgctctgcaagccgcaggtttgcggagcaatttgttctgcctgatagggttgttaagggtgtcgcaatgaggtccacgatttaaagcgcttccataactatttttctccttttacctctacgagagtggactgtcaagggcgaatgcaggttttgtgaggcctgaaccttgtgccatttggagagcccttttaaagaaaaataatgtaaaattgtcttatttttgcaaattttaccgaggtacacgaccatgggaacacctcgttagggcccctctcaaggccttggaagtgttcgcaaaaatgggcccttaaaacttgggcttcattagcttcgctgtcaacccccctgtgcactgaagtgtacacacttgtttacagatgtgtgcctcccctcccttgggctttccttattctatgtcccctattttatatatacagaggatatttcataaatctgtgggtttttttttttttccttttgagatggagcctcgctcttgtcgcccaggctggagtgcaatggcgtgatctcggctcactgcaacctccgcctccctggttcaagcgattctctcgcctcagcctctgacctagctgggattacaggtgcccgccaccacgccccgctactttttgtttttgttttgttgctgttttgagacggagtttcgctcttgtttcccaggctggagtgcaatggcaagatctcggctcaccgcaacctcccgcctcccgggttcaagcgattctcctgcctcagcctccggagtagctgggattacaggcatgcgccaccacgcccagctaattttgtatttttcttcagtagagacgggatttcaccatgttggccaggctgctctcaaactccccacctctggtgatccacccacctcggcctcccaaagtgctgggattacaggcgtgagccaccaggcccggcctaatttttgtattttttagtagagacgggggttcaccatgttggccaggctggtgtcaaactcctgacctcaagtgatccgctcacctcagcctcttaaagtgctgggattacaggcattagccactggcccggcctgtggtgttgttgttattgaacatatgtgtcttgctaccagatggagagctccaggtcaaagctgggttcttgaatcatagcttcctaatcttgatcacggaataagtgccaagcatatataaagtagaccatttacataaataaattaataatcatggcaactctagaagatacttagtgaaaaaaacccttgattgtctttgaaccaatcaactaaaataacatgatgaaatggagactgggctttgaatcaatttggagtttgcctggtttcataattcatggttcttctcatgtaactaatacaaagtccagcttctgacattgtaggagctcagtagaggttgaacaagctacaaatgtacacggataggtaccctctcctaagatgggcaagtggaggctcctctaccttaacactattcatttttcctccaaaataaattgataactaaattgaagagcagatactcacaaaacaatatcatgagactttacaacatcacagatgattttagatattcaggcatattaggtcaattagacatacgaagtaaataactgaatgttcttgggctagacggaacctccgctacaaactagcactgaatgaaatgtgtcagttttgaaaaaggaggtttttatacattacacaacctctaagggcacttaacagctctaatatgttttatcagggcccactgcagcaaaatttattttattgtaaagcaatattttatgctaaaataaaatagttctaaaagttgtttccacccctctttatgaataacttctcacttctccatggcgaaagaggactgaccacagcaaaaattcggtggaaaccaacagctcctggaacacaaaaactggggttgtttataatctctccaccctgaatatctagcaccattactatataataataggtgctcaataaaggtttgttaaataactttatttttaaaccttaaacagatactagaagagtccatagttgatttctggtcatgcaacggtttatttctatattgtaagttatgtattgttatgtattatttctgtattaagagaactgagaccacagtagcaaacatcatttaaaaaaaaaaacagctctatatagtttgcaaaagcctattttttaaaagtttaaatgaaacaaccaacgttttgagttgggaggatgtcctgttctctcttgggagttttcacaaccagcgaaatcagtatagttaccactgttttacgtacagagaacaagaattagaggctatcactagccagagcacaaagtgatcttaggtctccctcgagacaaaatccactggcgtgtggatcaactgcttgcagagagcatctgctgccgaggccaataggagccgtgtgtactcaagaccctaaccaggatcctgcaggtcccgcctccgcagccccacggggctgccggcccccccacctcccatcgcgagcctggctgcgccggcgtgcttgagcccggtgactgcaaggccccgggtctcccctgcgcctgcgcggcgagcagctggcggaaccggcatcttctggcgccagcttccggcttagcggctgagcttcaggcttgacgtcaggtgggaagggtgtggggtggcaggtggaggggggggaggttggggggggttgggaggtaggggcgggggggtggggggtggcagattgacggtgtggggggagtcaagtggaaggtgtggtccagcaggcggcgagaagtctgtggggcaacagaccgggggaaggtctgtggggcgtcaggcggggtatctgtgggacgtcaggttggggtctgtagggcgtcacgttgggggtctgtggggcgtcagaggggggaatctgtggggcggcaggtggggggtgttcggggcggggtttggggtgtgtgtggcggcaggaggcgggggaggtctgtggggcgtcaggttagggtctgtgaggtgtcaggcggggtttacgtggggtggcaggtgtggggtgtgtggagagtcaagtggggggtgtggggcgtcagattgggggtctgggggatcagatgggtggtgtctgggacgtcaggcgggggtcggggggtcgtcaggcgggggatgtgtggggagtcaagtaggggaagtggggcgtcagattgggggtctgggggatccggtcgtgggggtgtctgggacgtcaggcggggggcctgaggggcgtcaggtgggggsgtctgggaggcgtcaggcgggggtcggtctatgggggcagcaagcagggtgtttgtgcagcggcaggtgatgggagttgccgagtycacagcgctgtagactgcgccgcattagaagcctggcctcctgatgctgtgctcttcatctagacccaagccccagrtcgtgggacgatttctcccgtttttgactccctggaactgtattgcctgctttacctgcgtacatgttgattctttctcatggcaaccccgcaggaaaccatcaagatctcattttacagctgggattctctggttcacagaggtaacggagcttgcccgaggccaggtattcactgggaatccgtgaagggttgggggagagtagggggaacgggcagaggaatgatgtagactccttagggattttccattttccgagagggtacagggggcattggagcgggagagactttaggcttggagrgaattactttatttctcttcttacacttggtctttcattaacttttgggatcccaaagcccttctagcgtctttgtctgctcatttctttttgctgagattgtcccaaattgtcactaagtgctgtggaagataggcagctgtaaaccctttgtttcctagggaaacacagcttgtcaagggttgcatgaaggatacttcagttgcattcgtcacttactcctttttttcctctctcttttttaagtgcaatagcatagcacttaatcaccttccatagtcactgaataaaacctgccggtttattttcatgtgtcacttcaggacaatttagtcagaactgaatgaatgatgaatcgttattgtgtactaattgcttgcattcattctcctgaaagctttgcttattgttaaagagtgaagcttcttcccacctttttatctcgttaatattttgcaatatttatattttaaatgttgcttggatcagcaagcattatagtattaaaattatcaagacttactactttttaaagcacattttgtagattatctgatttttatcttcattctaatttctacatagtttttaaccccattttatactttaggaaactgaagcttagagaaattaagtaattgcccagtatcacacagctgttaaatgttaccatccacatttgaactcagatttattagagtctaaaacctgagccctaaccaggaacctcctcatttgtcttactgcaaatggaatgaatcagctaaaatcctcagaatccaaaaaataaaattagcatgtaaaaatgaatggaagtcctaatctttgactttttatgccgttgtaatgagcaaaaatacttacgactagtttatggcaattttggaatccttgttataggcgtagccattttaggatacatgtgtatccacaccattacctacattttgtcattataaagtaatttaagtccttgcctgggatttgttgagcgaaactttaactttgagaccatgtagaatctatagatatatctgtagaaactatataccaatatttgaatattaaagaaatattagttaacctactttattttacatagtttatatagaaattgtagatatagcattgtgtaccctgtttactcccttgagggagcaaattttgggagatagggcagtgaacatacataaccaggtgttacagtcagttatgcaaaccagattcagagagaggaaacaacagtatattcaaagataaaagtttcaggaaagtggtctgtcatgcgtttatccctcgatctaacccactcagtagaagctgggtttcctttgtcagaaattagactgagaagtgcaccttttttctctataggccaccaaatggctgttgtaaaccattgccagggcagtcagagctactgaatatttttaaccaaactgaatctcacccactgtgtgtctgcgtgcgtgtgtgagtgtgtggtatgtaaccagaccatagctttccctagtgtgcttatccaggagtcaactctaggtgttcagtaattcattcagcaaacctcctacatgtctgccactagagcacaaattacagcacaattcctggcctctagatactgacagtatagtaaatgtagtattgtaattagccatttgatttattttactggatactagataatgtagccttgtgcatgtgtgtgttgctcatttgtttgcgaattggaagatggggagtcacatattttctgcactgtaatagatctccccactcccagcaaaacttctccaactccactgcctgggatacatggtggtgtgccaggaggggtctgaaaccacaggataaaacatagtttctattcatggaccatacattttacttgaaatctttttttggaaaagttatttaacattacatagtttaaaccatattaaaattactctaatatatttatcttccagtagaacttgtatgaatatttaaaactaaagaaatttacacttgtgaaattttaggaaatattcttgccctagcttagcaaggtacccattatttcttctctgactttagcagatactttagggaaaagctctcccctcaggacattttacgtttgttttattttgttaaagcacttggcattttattatactcagtttccactacactccccccctttttttcttttcttttttttctttttttttttttacagaatatattttcttttaaagcagaaacatgcagtattttcccctagcacagtgtatgtagcacatctcatatgtagtcattaaatactcagggaataactggcatggaaatatgaaaaaagcagcatactaataaatttatacttataagacagtaagtaactatggtaaaatagataaagtgaggattttatgggtagggcattttgagttggaatcgaatgctggtgtgatttggcatagctagcagtgaagaagtgaaaggaaacatagacgtaggctttgtttggctggaagaagagggtacctgttttttcctttgttttgttttttggtcaagggccctgcctatgattaggatttctaggaagtcaaatttcagttcagcaaatgagtgatttgttaaaaatatctgttcgaagatcaagttcatttctggtgctatgtggtagtctgacagggaaagaagagacatacatgaaaggccttccctcagaagctcagaagtgaagtgaattaagcctgatgagtttttttgtcaccattattagcaatatttgtttgtattatgtgctaartaattaatayatagaataactggaatttaaagagaaaattaaaatgatttctgtattataaatacaggaaatacagctatatagctgatgatacttttcataataacttcaaattagggttggagcaaaacagttattaaatgtagaggttgaaaagatacatcatttagagcattgatcttttttttagtaaacattaataaacatttattatgatctcagtgatctttgtaagatctttacattaaatatttagttgaatcttaycttttacttaaagttattctctttttgctttactagttaaacgagaagattcatcamygctttgatggctgyctcacaaacttcacaaaytgttgcatctcacgttccttttgcagatttgtgttcaactttagaacgaatacagaaaagtaaaggacgtgcagaaaaaatcagacacttcagggaatttttagattcttgragaaaatttcatgatgctcttcataagaaccacaaagatgtyacagactctttttatccagcaatgagactaattcttcctcagctagaaagagagagaatggcctatggaattaaagaaactatgcttgctaagctttatattgagttgcttaatttacctagagatggaaaagatgccctcaaacttttaaactacagaacacccactggaactcatggagatgctggagactttgcaatgattgcatattttgtgttgaagccaagatgtttacagaaaggaagtttaaccatacagcaagtaaacgaccttttagactcaattgccagcaataattctgctaaaagaaaagacctaataaaaaagagccttcttcaacttataactcagagttcagcacttgagcaaaagtggcttatacggatgatcataaaggatttaaagcttggtgttagtcagcaaactatcttttctgtttttcataatgatgctgctgagttgcataatgtcactacagatctggaaaaagtctgtaggcaactgcatgatccttctgtaggactcagtgatatttctatcactttattttctgcatttaaaccaatgctagctgctattgcagatattgagcacattgagaaggatatgaaacatcagagtttctayatagaaaccaagctagatggtgaacrtatgcaaatgcacaaagatggagatgtatataaatacttctctcgaaatggatataactacactgatcagtttggtgcttcycctactgaaggttctcttaccccattcattcataatgcattcaaagcagatatacaaatctgtattcttgatggtgagatgatggcctataatcctaatacacaaactttcatgcaaaagggaactaagtttgatattaaaagaatggtagaggattctgatctgcaaacttgttattgtgtttttgatgtattgatggttaataataaaaagctagggcatgagactctgagaaagaggtatgagattcttartagtatttttacaccaattccaggtagaatagaaatagtgcagaaaacacaagctcatactaagaatgaagtaattgatgcattgaatgaagcaatagataaaagagaagagggaattatggtaaaacaacctctatccatctacaagccagacaaaagaggtgaagggtggttaaaaattaaaccagagtatgtcagtggactaatggatgrattggacattttaattgttggagratattggggtaaaggatcacggggtggaatgatgtctcattttctgtgtgcagtagcagagaagccccctcctggtgagaagccatctgtgtttcatactctctctcgtgttgggtctggctgcaccatgaaagaactgtatgatctgggtttgaaattggccaagtattggaagccttttcatagaaaagctccaccaagcagcattttwtgtggaacagagaagccagaagtatacattgaaccttgtaattctgtcattgttcagattaaagcagcagagatcgtacccagtgayatgtataaaactggctgcaccttgcgttttccaygaattgaaaagataagagatgacaaggagtggcatgagtgcatgaccctggacgacctaraacaacttakggggaaggcatctggtaagctcgcatctaaacacctttatataggtggtgatgatgaaccacaagaaaaaaagcggaaagctgccccaaagatgaagaaagttattggaattattgagcacttaaaagcacctaaccttactaacgttaacaaaatttctaatrtatttgaagatgtagagttttgtgttatgagtggaacagatagccagccaaagcctgacctggagaacagaattgcagaatttggtggttatatagtacaaaatccaggcccagacacgtactgtgtaattgcagggtctgagaacatcagagtgaaaaacataattttgtcaaataaacatgatgttgtcaagcctgcatggcttttagaatgttttaagaccaaaagctttgtaccatggcagcctcgctttatgattcatatgtgcccatcaaccaaagaacattttgcccgtgaatatgattgctatggtgatagttatttcattgatacagacttgaaccaactgaaggaagtattctcaggaattaaaaattctaacgagcagactcctgaagaaatggcttctctgattgctgatttagaatatcggtattcctgggattgctctcctctcagtatgtttygacgccacaccgtttatttggactcgtatgctgttattaatgacctgagtaccaaaaatgaggggacaaggttagctattaaagccttggagcttcggtttcatggagcaaaagtagtttcttgtttarctgagggagtgtctcatgtaataattggggaagatcatagtcgtgttgcagattttaaagcttttagaagaacttttaagagaaagtttaaaatcctaaaagaaagttgggtaactgattcaatagacaagtgtgaattacaagaagaaaaccagtatttgatttaaagctaggtttcctagtgaggaaagcctctgatctggcagactcattgcagcagrtggtaatgataaaatactaaactacattttatttttgtatcttaaaaatstatgcctaaaaagtatcattacatrtaggaaaacaataattttaacttttaaggttgaaaagacaatagcccaaagccaagaaagaaaaattatcttgaatgtagtattcaatgattttttatgatcaaggtgaaataaacagtctaaagaagaggtgtttttataatatccatatagaaatctagaatttttacttagatactaataaaatacatttagaaacttttaaagtcatgaaaaagcattaaccttctaaacagtatattctaaaaagtcaaaacgttaacaatagtttttatctaataaaagcactgcaagaaaatagggtagaattgttacagctggacttgtaaaaatatgtctttttactcagggtttaaaatgtcccatttaaatatgaaatgtaaacaaatttgttttttaaggttaaggccaaatgtaacaataaaaccctgtcgatggttttagctaaattagaggaagttgtatgagacttaatgatctaaaaacttaaaattgaattggtttgattaaaaataaagcttgcaattttaaaagtagctcacatttaatttcttgtgtgaaatagaacatgctttaaaggaagtatttttatgtgaatttgcattccagtataaatagtattcacaaaaaagattttcctagattttatctattgaataggtgtcaatatggcatgcatattgtaactttcattagaaataagttgctttgacttttaaaaatgacatagttagattatttaaagtcaatgtatatagtatatattatgtatggatttatataccaaattttggaatacagcctatctcatgaccatattgaaatgtacggaatttgatccatgcgatactatgtgtgcattatttgaaagttattggaaattttattcaaaccgtggaacaaatgtatgtgattttgttatacttcttaatttaaataaaatatttaatgcactattaaaataatttcttatgttctattctttttaaaacaattcataatagttgtatcacatagatttttttggtgtcagtaaaatttttttttttttttttgagacagagcctccctctgttgcccaggctggagtgcagtggcacaatctcagctcactgcaacttccgcctcccgggttcacaccactctcctggctcagcctcccgaatagctgggactacaggtgcccgccaccatgtccggctaattttttttttttttttttttttttgagacggagtctcgctctgtcgcccaggctggagtgcagtggcgcgatctcggctcactgcaagctccgcctcccgggttcacgccattctcctgcctcagcctccggagtagctgggactacaggcgcccgccaccgtgcccggctaattttttttttttgtatttttagtagagacggggtttcaccgtggtctcgatctgctgaccgtgatccacccgcctcggcctcccaaagtgctgggattacaggcgtgagccaccacgcccagccatgtccggctaattttttgtattttttagtacagacggggtttcactatattagccaggatggtctcgatctcctgatctcgtgttctgcccacctcggcctcccaaggtactgggattacaggcgtgagccaccgtgcccggccaggtgtcagtaaaatttttgactggtgccaatctacttcctctttaagagtctttgtatttcacattacccatgagctgtatttaaaattttaaacttaagaaaagtacaaaataaatatttagtgtaacacatatgtataaagcaaagtatgtgtttcatttaatcagcttttctcaatgaattttgaaaatatttacaattctctaaaatatagctccatcattttaaattgttgtgcaatatttcattgaatgccctgttatgtagcccattattgttcaaattttagactatttcaccatgccacccccaccttttttttcctttttctttttttttttctgacagagtctgactctgtcgcccaggcaggagtgcagtggtgtgatctcagctcactgcaacctccacctcctgagttcaagctattctcccacctcagcctccctaatagctgggatcacaggctccactagaataaaatacatgaataaaggcactaggtcaactatttacaggataaatattctgaagccaactgaaaaacacacttggttcttaattctccaaggctatggtttcttgccggaaaacaggacagcagatttaccaagagctgctccaccctattccatatatctgatgatttagaagtgtcctcaaggagttcatttcaggctgacggcaacttctttgaaagtcaggtggctagagtagctgcattatactcatgtgcttgacctgggatctatgtgaacagggctcctttggccccttggaattctcacttttgggaaaatacattgtgtttaaaatgtctaacatggaattatttgagccctagaatttatcctgtaaacaacactacaattcactttcattcagtagaataagttcttactctcattagtagccctttgggtaaaaagggggataaagcaatccctgccctcaaagaactcacagtgtattgacagataaagataattggaatacaaaaggtaagtgtattcccagttaaaggaatgatggattgtcctggaaagtcatatggtgtaggggaaagagcacaagctttagaatcaagtcattctgggctcaattacagttcagccaccaattatctgttattttgagcaatcacaacttctttgaaacttagtttctcaagtttcaaatgcaaatgacacctgtcttatcagaatgtttgaggacagaaccatagctcccccgcacatactaaggactctagattttacctgctattcttacccacacccaggttagtaagtgagtaactgagggaaaatgggtcgaatttcatcaggcatagtggtatggaaggtttttcctggcggaggagagattataaataaagccataggggatacaaaagtgtgtggaaatacttgtaaagcattgagatttaggggtgagggagagagataggtgaaagtaggctagggtagattttgaaaggtctgaaatgccacactacggaatatgtagtgtgctcaagataaatgcatgaagaattgtaagcaagatattttagcctctcgtgtaaggcttttttttaatttcattttttttttgtttattagaccacttaaagtatgataaacatacaaaaagcagtacatatttgaagcatacaacttgatgagtttggaggtaagtatacaccttttgagaccaccacattcaggtcataaacttatccatcagcttcaaaagttatcttcttccccagtatttattgactgagtccccaccttgcgttctgttatttaatgattcacaaacatgagtgcctcttgaattctaggctttgtcctagttctggacaaacagcagtaatgaaagtgggcagaaattcctgtcttcgttgagtttccattttagtggataaagagaggaaagagaaaaattcatgtttccttctctgtctgattctccgtctttggaggctatttccctcagcatttcaaaaccatgtattttctggctgatgtttcttttcacatgcaagcatttctaagaattgtctaaacttctagtttcactttctggcttttcactcttaaaattacacatataatgttctaacaaagtctttgacctcttcattgataacaccccataaatgttaaagagcttgttgggtgttccactataggaacacaggcacttacatagcgttcaccgggaagaaacgataaccatgttctgaagttatgtatttggagtgaacattgaaggaagaagataatccacccaactagtcagctagatgaaccaaataagcattagtgattctgactgatagacatcatggggacgttgcctttgatggaacacatgcttcctttgatatttgaaaaattttggagcatagaaaaaacatggaagccttccaaaatcatttcttagggcttagtaatcttgatatcaccctctatcaaaaatagcatagaatgtggagtgaccagaactttcatatgttgctagtgggaacatgcaatggtgccactttggaaaactggtaatttttaaagtgatatacctactctgagactcttaaacatgtgatgtgctcattttactctgagtaaattgtacttcaaaaaattatttaaataaatatttgaaacaactattgattgtatagttacatagataaaacatcccaataatgcatttaaattaatattgcagtaagaggagcaagaaaatattttcaatattttaagaaatgtgaggataatacaatattatatatatattatggcatgtagctgtattaatagactaaatgcagcaataaaaaaattggtatatgaaattcaaaagcattcttttttaagcaataagaacaaaaataatttaaataaaaattggagacttcttagaagagataatgctacaaaaaaaaaaaagccggtagcttttgggattttaggatgatggtggcagtggcatcacagtttttgaatccctataaattcccacacatgaatgaaacacaactgcatagcaatcaaaaacccatgaacaacatttacaataggactaagtgatgaatagatgaaaacagacaggtgagccataatacttgcatgacattcatatgtgtgtgaagaaaacagagggacctgagaaaagcagaaactccttagcaaggatttactggaaagcacagtgggcaagactgagagcagcacctgaaactaagagggattttgtccagtggaatagcaggtgagggaaaggagccctaggtaaatctgaagggcctagtaactgtgaattctcagaactgagccaccattgatgctttccagctcaggacctcataatgaagaaacactggtgggaatggaataaaaggtgagcaaaataggggcaacagaaagacaaaggaaatagaaggtccacatgaaggtgaagaggaagcagccaacattttaggaagcaaaccattatggttctgaaaagcaacagaagtaggaattctgtgacattagaaaaattactattaactacattttcttctagatgttcagtgaagctaaactaacctaacaacgaggaaccaaatgataatgggggctaaatttacacaaagaagaagaaaatagtgtgattgaaagaatccatttccacagagaatgaactcacataagaaagaaaagcccctaaagcagatcaaaattgtaacctgtagcttcaaaacatctgaaagatttttttttaaatacaagatgtgaaagaacaacattttatttcagaactggaaaaactcagaaattagctgacagaacttaggaactagatataaaagaaaaaaaatctatgcgctattggaaacttaaacccatagaagtaattaatatgtgtaacataaaacatattaaactacatgaaatgttgaaccacatataaaatatcattaagtcagcattggtgggggtggagcaagaagaggtctgggacatctaccttcttccgacatcacccttccctaaatctaacccattaaaaggcatgtaacctcctggtccttggtagttcagtaggacataaatgtgaggatctctgaggtcctttccaactttaacattgtggtacatccaagaaccatttactggcaaccttgaattaatttatgaatgcaccttttatatttatttatttayctgcctacttgagatgggggtcttggtctgtcctccaggctggagtgcagtggtgaaatcatggctcactaaagcctcaacctcctgggcacaaacgatcctcctacctcagcctcccgagtagctggaactacaggcacatgccagcatgcccttataacttttcaaaaaaatgttttgtagagatgggatctagctatgttgtctaggctatctcaacttcctgaccttcagcaatccttctgcctcagccgcctgaccttttatttttatggtgagatcttaagctagtatccgtggttggtttgggagatgggactgggtggccagctgatagag

SEQ ID NO: 95321 - DNA, 26297 bp, Homo sapiens
aaccctctgggatggaaaagaagaaaatggagagtgtggggcagacgccggccgagccgagggcaggtcagcacagcctcatgtccggcagagggtgtccaggttcttggcatcatgaacaaagaattggacaaaatgcacaaagcaacggaagaaggaagcagcaaaggcagagacgtgtggaacatgaacgcgcactccacagtgcagtgggagccgggctgagcacagggggtcgggagccctgttacagaactgcctggggtctaaatatgctccagaggtttccactggttacttggtatatgccctatgtaaacggagaggttatttcctgtcgtagctgatgtgtttccatttgattttgttctacggagtcagcgtgaaacagccttaggttcccaggctccagatcctcttctcctccctcactgggtcccagtcattgccccattgtctggatctcggaggctgcccctggtgctggctgaagcccagccaccatccccgaaggccgctccttcccaggatgtccagaggctctcggtgcgtcgtttcccaggtggcccctgacgactgagggctccaggctctgcacagtccacgctgccactgggatcggaagggcggattcctccctccttccgtcactcattcactcaccaatggggcacctgccatgggccaggagcagagtagagggtgttggaagcgaacccacgggtgggcggtcgggtggggagggaagcccgcctgcctctgcccacaggagcccaggcctgacacggccccaggacacaggcccctgccccacacggcagcacggatgcccacggcccaggcctggcatggttcagaggaggacgtggacaccaggtccactgggggctgcctggacaccctggaaactgtgtgcaccacccgggtggccgtgggagtgcggcgctcagcctgagaaggacccagcgtcggaagcccctgtaggcgccagagccggccctcggacgcttcaccaaaggaagctgcagcctcgtctgggctccgacggcccttcctggaggtcttgccgtttctctcatttggtggaagaggtcacggcctgtggcacccaggccccggctttcgatgctgagccccgaacccccggcctcagcctcatcttgccaagaggatgatcctgtggaaaggtgaagtcgctcccgaaattggggggcggctctgagcccccagttgggtttgctaaggcttggaccggtgctgccaaaggcccttccgaccacatcatgggcagggcgcagggccagagccagggccaccctgcaagagccaagcccctggacaccactgccggtggggaaactggggaaataggtgctctggaggtatttgggggaagggtgaaggaggagccgactgcagcccaggcccccctgcccccgcttgctggggttgggacctcggctcctctgccccagtgggatcagctgctccaagccccgccacagtcgggaggcccttggaggggctcagggagcagagcccgctgtggtgggtggggcagccttggtagtggagggggctcctgaaccgcccattctctggggcacttgcctccctcctgtgccctaggcgagataccagaggagggggcttggaggccctaggcctgattggacgccgccctcagcagtgagtaaaaagccatggggtgaggccgaggctgggggctgggccttcatccctgccttgcttgggctggcctgggccgtcccaagcctcggtcccactgaatcatcacacgcaccctgcacgaaagggaaactgaggcctagagaggcagggctgatccaaggtcacccagggtctcctcgctgggtcgggctgcctgaccctgaccctgggctcttcagccccacaccacacccctctcggactgggacccaggcaccctctgggcctccgtggtcctgtgtgagctccagccatggctgcgtcagaggccggagctctgcgtctgctctggtacttcctgccacggagcccgacttgcccgggctccctgctcctcagaggctccacttagacacaggtgtgctgggtgcgagaggccgtgcatagggcacagctgctctgggcagggaagggctactgcagtgtgggcccctcctccctgggccgtctcctcccttctgtctcctgatgcctccccgcccctgtcctctccatccacctgtgtcctctgtctcccagcccagacatcatcctggcaggagaaggaccctgtggggtgtgctctgcccctcactcccaccccagcctgtgacctaagagctccggatgggacatccaaaggcgtgacctcctgttggctcctacatctggggccatatgtcccaaggtcccacgtgccctggccagcgccccttggagccctcacccgccctccctgactccctagggagagtgtggaccgccccgcctgctgcagaggtctgggcagccagcccagagggctcacctcatctatttttaagcacaaacccatgaaagattcacaggctgctttatttacaggtggtgggaatggcattgcgcccagcacacccaccagaaggccggacaacccgtcggccagggtacgctctgcccgagagccccaggcatgcccggcttggaccttagccactctgtgcaggctgaggtcccggcatagcctggcctccccgtccagcccccaagccaggctttgatgtcctccctggaaggaaggagcccctgaagggtccagcccgaggcccagctgtgccgtggctgccccctggccacacgtccccgtgtctccagctgccgagaagctctccccttccctggctcttgtcctggtgtctctccggggcaggtctttggggagaggcctagtcaggcccatgtgccccgccagcccggcagctgcctcctgtcacacactgggcacggcgagcgtcgcgtctccactttacagatgaggaaaccgaggctctggtgccttggctaactcagggtttaggtttaaagccagatggactggtcttcaaagcccggctgccctgcccctgccagtccttcctgggccacacagcactggcttcatctctgcttcctggaattggagaggcttggctggtccttccgtcctcactcgctccctgagctgtgtgggctccccgggcctcagcagccggtgccaactcagctctcactgtcacctggtgtcatgcgctgtctggccgggtcccagcaaatgcccaggaggactctcagctgtccttgggtgggtacagccgcacggccaccaccggcccagcactccctgcccctggtagctgagggcatctcaagggtcagacagggcgctggccatccctacacaacagaaccaggctcccagtccctcaccacactcttgggataaacccagcagagcccatgccagccctccctgggtgagaagcactcattttagagaaaatctcttttctaggctgggcgcggtggctcacatctgtaatcccagcacttcgggaggccgaagcgggcagatcacttgaggtcaagagtttgagaccagcctggccaacatgacaaaaccctgtctctattaaaaatacaaaaattagccgggtgtggtgtcgggcgcctgtaatcccagctactcaagaggttgaggtaggagaatctcttgaacccagggggcagagcttgcagtgagccgagatcacgccactgcactccagcctgggtgacagagcgagactccgtctcaaaaaaaaaaaaagaagaagaaaatctcttttcttggcatctctgccagcccataagattctctggagctttacttctagaaacaaataatgtgttagcttcccaaatgtggcattatattaaaatacacagtacttcctcatcactccccaagtccctggcccgcctcctcttggatcttgtcggaggaaaagtggacgtttctctcaacacttctgcaaggtgcagagaagagggaggaggtgaaattaggtctcaccctcttcaggagagcagtgggcaaaaccccaccttgtctggggaggcaacagggtcaccgtgtgctgccctggcactgttcctgccagccctggcaggagtcttccggctcagagtcagcctcttttcctctgtcacgtcccggctgtctggtgttcacccttgagagcctcagttttccctctgtaaaatggggatgcctttgctactatggaaagtgtgtgctgagcacctgctatgtgccagacattggcctgagtgctggtcgcacatggtgcacaaaacagatgaggccccacgggctccattccggggggaggagaggagggagaggtgtccaacacacacacagtcacctaggggtgcaggaagatggtggccaccctggaaaggtcggtgggctgggaggtaaaggacaagaagggggctggcatgtaaagcccctggacaggcctgatggttgtgaggactggattccacagccagggtacaacctgctcgggacctgggtgcacagagcctccagctgaaggtgctgtgaagccccactcctccaggaagtccacctgggaccccagcccacacccccgcatcccccagctcccggcagcggcactcctgtctgcagggtgcacccacctcatctgccctggaagatgaaaaccccgcagccgtcagcagccacctctcagcctctcagaggcacagcagtgcagctctcagacctcccggctgcggggtgtgcagttccggctcyaagcgtggaaagaggtcaagccaggccctccaagctgattccagatgaagcccatatggatctggaaggagactgggctggaaaatgctctcctgggtttcgctgtaagatgcctacaggcctaaggcaaaaggatgtgtctccactttcaagaaaagctgggaccgcctgggcaggggctgctgagcccaggcagcgagaccccacgtccttcaggaccgcagttccccattcatttgaagagcagtttctgtatttgtcattctctcagtacagtttggggggtggttacaatgttcagggaaatgttttaacagctcaactctgcatctgaaaaaagaggggccgtgctcccctgctgacccgttagagcgcagggcggccagcactcccgcaactgcagcaaacccaagagtccctatgaggagggaccccaggaaactgcttttcaatctccatctgctccctgaggtgggacgccgggtgggggccgggccaggtgactgctgcccttgtcccagctgcaccttgccctgccacgctggccgtgctgccaagcggatgtgaacgccgccacctgacacccacctcgcctgcccccggagcgtccctggtgacaaggctacttctggcacccagggtggggcaacccagccccgcccagacacacgccccagttggcctgcgcgcccccacgagtctccccgcaggggaccgagaacaccctaagagccaggctttctgccaggtggccactggtcactcgggggcggttccggcggccctttgcgtggccaccggcctggcacgggcgcatccccgctggttttacgcccttggggagctgtggttctgcgcgcgggagcctgtggctgccccggcagcggggggagggggcaccgggcggggcaggaggcccagaccatggggggcagcgccagagcccgagccaccggcaagccatgatgggggggtcccctgggaccgggagggtgggagcagagcgccagagcctcggtaacctggcagaaggctgtggggagggagcgtggaggggaggtccgggccgggtgacccagggcgggaagggggggccgtgtcggggcggggttggggacagtggcggggcggggcctggtgaggggaccgtgtcggggcgtkgttggggacagtgtcggggcggggcgccgcacctagcccttccctgccgcgcgctcctcccccacgccgcgccccgccccgcccagccccgccgccctcgcaataaggggcctgagcgcgcgggggagaagcgggagcgggagcgggagcgagctggcggcgccgtcgggcgccgggccgggccatggagctgtggccgtgtctggccgcggcgctgctgttgctgctgctgctggtgcagctgagccgcgcggccgagttctacgccaaggtcgccctgtactgcgcgctgtgcttcacggtgtccgccgtggcctcgctcgtctgcctgctgcgccacggcggccggacggtggagaacatgaggcaaggccgggggccgccgggaggggccggggaaccgccgcgccgcttccgcttccctaactttcttctgggcttccctccttcctgccccgcccgtcccgccccgctccggggctccggggagagcgcgcctgggccggcggcaggcacaggagggggtcccggagtcagggggtcccggagtcacggggtcaaggagccggcgtcacagtgcccagcaccccaccccccgccctggccccgggcgtctacaccggtttcggcctccgccgcgtccctgcagcccggcgtggggttccgggggtggagcagctttcggagagaaagggggccggtccgcgctgggagaggctcagccctgcttcctgagcggggaaaccgaggccggggcggcggggacttgccccagggctattgatcagggcgcacgacggcgtgggggcacccctcggcctccctccgaccccctcctgactgtccgcccggtgatgggcgcacctgtggggcgggttcccctttctctccctttcctcttcgcagggaggtgggggacccggaggggacctgcttccgtgctggggagcgcgcccctggcctacagctccgggggcccagcttccaagcgaagggaaggaagagttaggactagggttcggcggggctgaaattttcccctggacgccttccagaaggtgggagcttggttttgccaggctggggttgggggccagaggtcagactgggctgccaaagacggcgggggctgcctgctcctgggcggggtggctgctggagaaggctcttgcctgccccctctccctgttagccgtccccaggctgttgctacatttctccctgccctgtttggactgcccagccagtggcttttgcaatggcctggggtgggggcattgtggccccagaggcccccttccccgtggttccaggggcagtgggtgagggtttgctagctccctgcactcgctgtccttgccagccctgggagggcactgaggctgctggaacgggcctacagtcatggcttccaacggagccccagaagctccaggaatatgaaggaggaccctgggcctgatggtgagcatggagagtccgagaagggcctgctggctgctcagccagacgtgtgtgaccagtggtgatgtgggccaggtggcccaggccggggtcccggggagcgcacactccagggctggcccaggtggtgactggcgctgacgtccccagtggagcacccttcagcgaggaaggcagtttgcagaaacagggagttcctgggggctgggctctgggcacctgtgctggaatctgtgaaggcctcacctgtggttctggccctgggatcccctgtaggcaggggtctctgtgaggggcccccctcagcccctggggtgcttcagagtaggggcgagggtgcggctttcccagctgaggaggggccagtctgtgggttccttggggtgccccccaccccgaggaaatggcttgtgtggttctgatgcctgcagggcatcctgtgctgggcgtgtcctggggtgtggacaggggacggggtcctgttcttttggcagaaatgatggggcacctgacttaggagaccctggagcagaccccactactgagccaggccacaggccacgggcctcttcatcggcggcctcctcgtgtgagaaagcctggcttgttctgcaggggcctctgcctggacttcctagctgttttccagggaccaaatcacagttcacctgctgccctttctatggacctggcaggctgggttggctggcactggccctgctgccccactgggccctgtccccatctcagcttggagattctggctaacctgggtgtcctcgggacctggggcctctgatggtgcttggatgggaccctcctgccgccctcacctctccagggcagcacccaggctcaggcctgtggagtagtgscttccgggacactggctactaacagcaggtgctttgttcctgctttggtccctgaagagaagggagggccagagggcagggcagtctggaggagaggcctggggctccatggctaccttcccccacacctctgcacgtgctccccaggccccagggtccctgatgacttccaagactcccagcaatggctaagagtggggctgttgcgaacgtgcgttccctccgtgggggccgtcgggaggggtgagaaaggcagatgaagagcaggcgctttgtcactccagggaagggacccggggggctggaagggaaggaggggatactcggcctctgttcctgctgtacgccacgggtgcctccagcctcaggaacagggattcgcgtgtgctctgtgttacaaataaggacactgaggctgagataagcaacttgaaactggggcagggtccccaagccaggatggggtggaactggggttcgaacccactgacagtgactccagagtacctgcttttccctttccccttgttcccagcccagcgcttggggctggtgaggcagccctgcggcaggcctgagctctgggaggggcgctccatcttgcccctgagcaatggctgccctggctgaggcccagcccctccccacggggttccaggcggcacccaagagacccccaccgtctacaccgtagttctgagcgtgtgagggacagtgatgggactagaacctctgaggcagccttcgttcccaccgggcttggggctgagaccayggaccccttccaggcagggggtgtcccctgagcccttccctgtgtgcgcagttacggtggagctgcaggggacgtttcctcaccaggggccgatgccctggtacatccattcgacagaggaaagcaaagcccagagcggctccgtgtcctacagctgggttcagctacaggatcagaaaaccctcaagacagcagcttaatccacagagaagtttactttttcatacagcaaaggagaccagatgggcagcctagggaaacagcagttagtttccggctcctttgacctctattcccaccattttcagggtcccagacagaaaaggggtgctcttcctcttaaggatgctccccgaattgaaccccacgctctgctggtatctggaggccgggacctagtggttgtggcagctcctggctgcagggcaggctcctgtccccatggagcacgtgcccacaccacacgcccagtgtggggagaacgcacaggggacttgggatgtcgggcaaggtttgacccagatttgccggccagtgcatggtcccgggtcctctgacagatgtccggtgatgacagatgccatcgggggccctgtgtcaccacagcactggggtcttagtcccaagggagaccgtgaccttggtcctccagagcgctccaggtgtctctgtgcaggcccagaaattggagctgtcctgactgagggatgggagggcttctctggccccacctccttcccgcccgccacacctgcactcctacacatccgctttgaggagtcacggggaccccccacatccgggtgtttgtgtgggctggaccccgcacccctatggacccatcccgccttgtgctgcagcttggatgacacttgtcggaaaacaccagattcctcactggggtccctgtccccggtggccccagcgagccccagcagagggggagggggctgccctgaatgagctcacgcagctgaagatgggcaagtcctggctcagagagctgctgggtctcctgggagtgtcccagcccaggaccaaggcaagggtcagcgagtggccttccacgaggacagcctggccagtggcctgggccctgacctagaaccgcctcccagctgcctgagccaggtgctggtgggattgggggcttaggcacattgaggggccttttgcttcgatttactttggayttttttttttattttttgagacaaggtctcgctctgttgcccaggttggtcttaaacccctgagctcaagtgatccgtctgcctcagcctcccaaagtgctggggtcacaggcatgagccaccgtgcccggccccacccattttggattcttccccccctcccccccrccccctagtcatccccatcacagccactgttggtggaggtcctgccctggcccgatggtgccccgggtgtctccgcctcatagaatgtaagcctgcacacccttccacaagagcctgggaggtcaaatgcwttgcccgaggccatagctgggaagaagggaaatgggatccaaatccccgtcaggcccagagcctgagtgtgggagcagcccaggtgcctgggggctgagctcaggcggtctgaggaggctgggttcctgcagaccccagaggggtctcttacggggcttcgctcgaggccagtggactccagtctgagggctcctgaaaaagactgaggcagcacctgggctttccctcagcaggagcccactgctccgatgccaccagaagggcccagtctgggctcagcctcacttagttttgggygctgggctgctccctgggcctcctgccttgctgggcaaagctggcacaagtcacccgcctggcagtggccagcagggctccctgagctccaggcttccggcaaccttggctttgcccctgctccccggggaggcaaggagtccaggacctggatttggggtccgtgtgactgtgtcctggtctggcacagcgacacctgccccaggctttgaggaaaggacagggcagcccctcgtccgcctgtggttggtgggaggggagtttgagtgaggcagggtgtttggcacaggacagggactgggctgggcaagctggtgggggaagcctggggacagtggctgctctgagcttcctgctgggggaggccggagcaagctcccagccctgctgaggggttgaggggactgcggagcccgggggagggagggagcctcaggatgagctcctagagtcctactgggggcccgcrccgccccagcacgactctgccagctccgaagcagggttccgaggggggctcaggcctgttctggcttccctgctgtgtggccttggggaagtcasttaactttgctgaaccttgaacctcgcattcctcatctgaagaggggggttatgatcgtacctaccctggggggttactgtcagaacaaaaggaggtgactcatgtagagcccttgtctcgaggctttgcacacaggaggtgcagggggcctctgtgcttagaaggcgatttttctctgcttgggttcccgggggtgtcctcggccgcaggagcctctgcagggcttagttcagtcccttcctctctgaggaaacactttttttgtgtgtgtgagatgaagtcttgctctgtcacccaggctggagtacaatggcaccatctcggctcaacgcaacctcctcctccctggttcgggtgattctcccgcctcagcctcccgagtagctgggattacaggcagctgccaccacgtctggctgatttttgtattgttaatagagacgggatttcaccatggtggccaggctggtcttgaactcctgacctcaggtgatctgcccgccttggcctcccaaagtcctgggattacaggcgtgagccacccgcccatccaggaaccgcttgtaaagtgagtctagactttcccaccagctttcagaaagctctgaactatgtacgggacaccgcgggggaagtgcggtggccwcacgtggctggtgcagatggccctttgtccccttgaggacatcaacttcractttcttccacccccagggtatacctttctcccccagccacactgtgggctgcagagttctagagagccacagcctcccgctggcctggggcagcctccgtccgtccatctgtctggcctgaggaccaggggccggtggtgggcggcgggacacagcgcctgctcagcaccgcctgctgggcgggggtttgtaccccgtgtctttcacagctgagagaagtatcagtgcacgatccaacccctaagcagcttagattaaaaaaaaaaaaaaaaggaaaagttttggagctagagggtggtgctggccacacggcagtgaatgcgccgagtgccacggaaccgtgtgctgagaaatgggtacaattatattgtttaggtggtgcgtgttataccacaatcaaaacagaggagggctcggcgcgctggctccttcctgtcatcccagcactttgggaggccgaggcgggcggatcatgaggtcaggagtttgagaccagcctggccgacatggtgaaaccccgtctctactaaaaatacaaaaattagccgggtgtggtggcgcacaccagtagtcccaactacttgctaggctgaggcaggagaatcgcttgccgggaggtggaaatggcagtgagctgagatctcgccactgcactccagcctaggtgacagcaagactccgtctcaaaaaaaataaaaaataaatgaagatcttattttttaataatttcagatttacagagaagttgcaaagatattacgggggaccccatgtggccctcaccagtttcctcccttgttaacatcttacatcaccaagatgcagttgttaacactaagaaactagctggccgggcgcggtggctcacacctgtaatcccagcactttgggaggccgaggtgggaggatcacctgaggtcaggagttcgagaccagcctggccaacatggtgaaaccccgtctctactaaaaatacaaaaactagccaggcctggtggcaggcacctgtaatcccagctactcaggaggctgaggcaggagaattgcttgaacccgggaggcagaggttgcagtgagctgagatcacaccactgcactccagtctgggtgacagagtgagaccctgtctcaaaaataaaaaagtaaataaaagatggaactggccaatgtcactaccagagggaaccaatgtccctttcagatgtggcccragcctcctgcaggcagctagctttggaattgcaggtgtgtcttggctgctgctagaaatcatacacatgtccttcacaggagatgagtgtggacctgtcctgttctttccccgcgccccagctgtctgtgaaatggaccctaatttactttccctctttctactggtggctatttaagcattttcaggttttcctaattcactgcacacttcagcaccacaggcttctcactccagccatcgggcgaattcctggaagattctgagaggggaggggccaggtttcctcagggctctggccgggcctgccaacctgccctccacagaagtatcttgtctgtgcgactcctcactcctgccagccgctgggcctgttcccaacaccctggctggcacctcctgttatcaggcgttttaatctgtgccagggggaaggatgaggacagtctcttgtttccatttgcgcttctttgattggcgacacggccgtcttgctagcaccagacagttctgtgtttcctgttggtgaactgccggcttttgcctcctcgtcttcttggagcgtcacaggggtccgggaagctggattgcgcaaatgagtgtggaggcaaaacagccctgcagttcycctgagtgtgcrggtgctaccagcccgggtgtgccttctgggtgggaggggacggtggccggcgcggcctggagaggagatatctagagttggctgaggaaggcagatctgaggaggccccaggcttccaagtccagggacggacggctggactcatcaccagaattaaccattaggccccccttgactcagtttccccatctgcaacagggggtcatgagcattgccccatcagcctgaggtggtgctgccgcaggcctgggctcacacatggaagggcagagtgccagggctggggaggggacaggggtttgtgtcgcatgggaacagacgtcagccagagaaggtggagagttctggagatagagggaggagatggctgctagacaccgaatgtgcccagcgcccatgaactgtgcacccggaaaaggccaaggagatacattttatgttacgtgtattttaccacaatttttttttaaaggccgggcgagttggctcaggcctgtaagcccagcactttgggaggccgaggtcggcaggttgtttgagcctaggagttcgagaccagcctggccagagatggtgaaagcccatctgtaccaaaaatacaaaaactagcgaggtgtggtggctcacgtctgtggtcccagctagtcaggagcctgaggtgggaggagcccaggaggtggaggctggagtgagcccagattgtgacactgcacaatgtgacacattgtgtcacagagcaagacagagcaaggggagcctgggtgacagagcaagaccctgttaaaacaacaaaaatccccaccagtatggctttgagagaaggccccggctttgaatctctgctctgtggcctggggcagttactcagactcatctgtagaaagtgtggggcccttaggactgctgggggatcaaatggtggggggcactagtctgcatggagaggggagcagcactggcagccccccagtcagcgctggcacagccttgccccggccatccacccctgctggagcttcggagtggagctccgtcctcctggctccatccccgccggctgccctgtgatggggtgccctatctggggtgtgcccagagcttcctggcagcacagcagggcagaggttgggacgctcggagctggtcagagtcttcgggtaccccttggacatccctggtcccaaccatgacgggctgcttggacaaggccacctcacatttgcaggtgctccaagggcagcccccagtgggctgggcccctgccagagtgggggctgctgtggccagggctcaggtggcccrgaccctggctctgctgctgctcctggtgtgacctcagacaagccccgagcccctcgccgcctcttcacggggaaagggaaccggcctgattctgtagggtaggggtgagagagggtctcggtctcggctcttttctggaagaacctttcggaggtcgtttcagaggtctccactggcgccgacactttcttcctgatgtggccctgccttgaggggccagtgaccttccccagggtgtgtggggccccatttcctctgctggggtgcagaggctgctctccccgacgtgggtccttcatagcggacgtgagagccagtgccagttcctttccggctgggtcccctgtggggtggatgagggctgggtgggccctggatgtggatttggaagtgggcgccttcccatgctcctagcatccgagttccagaggctctgggttttcctctgttgctggggagayggaggcagggcagccgtccaggtgggtgagccgggcccgggactctgtccgcttcaggggctccctcccctgtgtctcccggtctcctgccccgtgccaggagggcccctccccagcctcctccacaccccacccccaggccttcscgccccagcctcggctgcgggatctgtgggacccgtgttcatggtggcctcccctgcagcatcatcggctggttcgtgcgaagcttcaagtacttttacgggctccgcttcgaggtgcgggacccgcgcaggctgcaggaggcccgtccctgtgtcatcgtctccaaccaccagagcatcctggacatgatgggtaggccgggcctcgggggtggcttctggggtttgagtggggccggctgagctggggctgtgtggggctgggtcccggggacgaggacacagggctgcctgtgcctgggcgagctcggcctcagtacctccctcagggccagacacagaggctcggaggccacacgacccgtccaggtagccagggagaaggcagggtgccaggcaggcctgtgggtgctcagcagctgtcttccagcgcacgctgtctccccctctctctctgtctctgtctctctgtctcccaggcctcatggaggtccttccggagcgctgcgtgcagatcgccaagcgggagctgctcttcctggggcccgtgggcctcatcatgtacctcrggggcgtcttcttcatcaaccggcagcgctctagcactgccatgacagtgatggccgacctgggcgagcgcatggtcagggagaacgtgagtgtgcagggccgggctcggtggggttggggtggggcctgggcggggccaggcaggggccagcttgtgacttggttttggcagaaaaaacaagacccccacatcatccatgctccgcaggtggggtcccacgccagacccctacatcatccatgctccgcagatggggtcccatgccagctgctttgcgaagtggggcttcttaggaggcgaggcggcgtggcctttctggggtggcctgggcgtgaggtcagtccaggctctcctctccctgcagctcaaagtgtggatctatcccgagggtactcgcaacgacaatggggacctgctgccttttaagaagggcgccttctacctggcagtccaggcacaggtaggctgagcccagccctccctgggtgggtgcaggctggggaggcggggtcaggctggcttaaggcagcaggtgaccaccagccgagctgaggacccttgacacacaagggactcctcccactgagttggggacagggcctccttgccccttcctgcacttgccccctgaccgaccagggagggcagccccttgggccttttgcccacacagagcccagagtgaccagctgcccttggtgggcacccagtgcttggcctgcgaggctgggcaggtagaggggtggggagccgggccgctcgcctctgctgcagagctctcaggaggctcatttctgggcctgtgcctggctggggtgggcttcagggcatgggcagtgggtctggacaagccaggcttttggtgtagtatcaggccagaccagagctcagggtgggtggagctcattgtaagcagygcctccagactctggacttcctggtccccagcctccaggggtgcagtgcatcctagggtgtctgggagaggccagggtatagccattcccccagcacctgtcctgcctctgccgctgtgctgggaagagttgcgtcaggagaaggagcttttacccatctgggtggggtctcgctcagggcaggggtctcagctccttccctcacactggccactagtggcccccagtgcctggccctgtgcaaggtggtggggagggggccctccttccagaggctcccagctaaggccgtgaggcctggggagccccggaggcgctgggctgggtgagcatccttgggctctgatcccagccctgcccaggtgcggggcacacctgcccagcctggggctgatgtcacttccctttgggggcagagtgagggctggatcagctctgggagagcagaggggagacgggcggctgtgatggggtggctgggggtggccgcagtgcagcttcagccaggagacccacagcttttccgtccctgctcccggtccccagcctacctgctggccccctccctccctgctgccagtccccagcctacctgctggccccctccctccctgctcccagtccccagcctacctgctggccccctccctccctgctgccagtccccagcctacctgctggccccctcccttcctgctgccagtccccagcctacctgctggccccctggaggttccctggctgcctcgggttaatgatcacccccaagtgcccttggatttgaccccggtgacttccaggaacaccagcaggctccacccctcccccgggctagggctgcctccctcactggcttcctgagatggagaggactgggagagaggcgtgggcagggaagagtgccataatctcctcctaaacyggrcagggccctgcccccctggctagctgcagacccaatatggggacaggtgtgaaccaggcaaacaygtgctagctcaggagggcttcctagaggagatgagtmaaaatttgcaggatgagcttatggaactctgggccaaccagagcaggacacatatcccaggtcccaggggcaggacagccacaaggacccatggcagcagcgaaggcaggggtgggtgggccgcaggacagggctccccaaccacatgcagcctggggtgtgcctggcctgtccccagggctgcctcagctgtgcgtctccctgcctgcaggtgcccatcgtccccgtggtgtactcttccttctcctccttctacaacaccaagaagaagttcttcacttcaggtacccccacatgtgtgcacccggggtgtaggccccgcctgaccctacagtcacggagccccgggcccctcatcgttcccatttccgggtggcacccgtggcgtggccacacggtgaccaygtggcgaatgagtgactcaggctggagtcccagctgtgggcttcatggcctcatggccctgtgagatgggtggtgctgggcccatttttcagatgagaaaactgaggctccaagagacttcacacggatggaccccagctgtgcacacagcttgggggcctggagggcggcctctgagcccatgtgtccaggctgatgcccgcatagggtagatggaacccaggsagcccaggggcacaggctgcggggctcatgacctcttgccccttccagccagttcccagaacgtgggcacctggtgcccaggcaggacagtggggtcaaagttggagagcagtgggggaacccagctccatctctcccacagcccctcgccccgtatggagggcagaggccaggcagtgaggtaggggctgatcaggaagtggggctttctgggggcagtaacaggggagcgcagacttgtcgaaaatgcggcgtgaaggccaggcagccatggggtttactgcagcaacgttactgcaattaaaataacccaccacggctagggagtccaggggaagagcccggcctcgggcttcccagggaggggctgtggggggctggggagaggcgaggccagggcagcaggctgaggtgggccccagctccccacaggccactgaggtctgttgcttcccccacaggaacagtcacagtgcaggtgcyggaagccatccccaccagcggcctcactgcggyggacgtccctgcgctcgtggacacctgccaccgggccatgaggaccaccttcctccacatctccaagaccccccaggagaacggggccactgcggggtctggcgtgcagccggcccagtagcccagaccacggcagggcatgacctggggagggcaggtggaagccgatggctggaggatgggcagaggggactcctcccggcttccaaataccactctgtccggctcccccagctctcactcagcccgggaagcaggaagccccttctgtcactggyctcagacacaggcccctggtgtcccctgcagggggctcagctggaccctccccgggctcgagggcagggactcgcgcccacggcacctctgggagctgggatgataaagatgaggcttgcggctgtggcccgctggtgggctgagccacaaggcccccgatggcccaggagcagatgggaggaccccgaggccagacgcacactgtccgagccctctgctcagccgcctgggacccaccagggtgcagctgggctccagggtccagcccacaagctgcatcaggstctctgggagaggaggggcctggagggccaggagtcccagactcacgcaccctgggccacagggagccgggaatyggggcctgctgctcctgctggcctggaagactctgtggggtcagcmctgtactccgttgctgtttttttataaacacactcttggaagtggctggggagctgtggtcactcacagggcgggcaggtgaccagggcggtggaggcgacgctgtgtcttcccagctgccctgcctagaggcccagggtgcaggcaccgccacccacccgtgttccctatccaggagtggacccacatcaccctatactacttccatcgatgggtgggggtgtcgcctaacgggcaagtgtgccgggatcctcaggctactgggaaggaggccagagatttgctctttggcctctggttggggccaacatgtccccaggacaaagctctctgtggcctcacagaaaccacctgcccaccccctctgccttggaccccctccccaccccacgactgcccgctccaccaggccccctttgccagctggcacccagcagtgggtctgggaggggtggccaggaggtgagcgccctcctcccaggcccccagtccatccactgacacagcagctcacgtttcatttttattgtgctgggggtcaggcagcagcccccactgaggccccacccagcctccgggctgcctggcctgtgccatgggtcccaggctccagcagggagctcgtaccttccctcagctgagggcccacctggccttgggatgccgttggggtagccagggtgggggtagccaggggtggattcacagagaagatcccagcccatcccatgccagggtctggggagcctcccgaggaaggggaggaggaagaggaggaaggccctgcctggccttccgctcagtcaccccgaggtggcttctggacccccagcatgttgggcaggggcatgggggctgcagggcggcgtgaggggctcagtccagcctggggcgctgggcagtcacgagtctttcttgcaggagcctagggttggatgaggcgaaggtcagagatcactgctccccacagcctccccgcccagctagatctgactggccccttggcctttggtcgcccccgacccccaagcctgggtagcccctctaggcccactgggcccagacccgggaggagggctctggagggtgggggcactcacaggaccccagctgctcctccaggaaggaaatctgctcrctcagggagtcgatgcggccgagctgctggaaggagtgcaccaggaggctgccggggtccgggagcccatgctccagtgcctgcgaggccaggctgtgcagtggggccagcaccagctgcagcttctgtgggtgcagaagggcagtgaccctgggccggcccccgccctctctgctccaccggggtctagggaggacccctgggaagggctccacaagcctccagcccccgcctccgcggcagggctccaagtgtccactagagggggctgccgtggcagaaaagcttgccgcagagtgggtgcctggggcatcaggctggcggggtggtcccagccttggggtccctggcaggagaactagggggacagctggaccactggccagtgggaagactggcaagagctctttgtcctggtggggacaaagatgggggggtggggaggtctcgtctgggtccaggctctgtgtattgtctggggggctgtcaagcttggttcctccggccctggggggtcctggtcagtgtccagctgcttctgcccagcatggatccaggccagggccccctcggcagtcagcagcgaggaagccacctccccagggccaggaccttttcagaccacccccagccatccgtgggtcgggaccatgtcccaggagactacggagcctgtacccgggcctgggcctctgctgttgtgaagacctgccccctgccgacgtctcacctcctccagcaggtccaccctggactgcctgcctccccccccgacgcctcatctcctccagcaggtccaccctggactgcctgcccccccgacgcctcacctcctccagcaggtccaccctggactgcctgcccccccgacgcctcacctcctccagcaggtccaccctggactgcctgcctacccccccgatgcctcacctcctccagcaggttcaccctggactgcctgcccctccacacctcacctcctccagcaggtccaccctggactgcctgccccccccccccccaccaatgcctcacctcctccagcaggtccaccctggactgcagcctctgcacttcttccttcattgcactgtccactcctgcgggcagagccaggcgctgggtcacggccggccggctccccacccacrcccccaggctccctcctgtccccagggagaggcagagccagaagactcaggcccaggcctctgccrcccccgctgcctgcctggcgctggccagaggtctcagggctatgccgcctaagtacgtcggggcgggtggctctgcgcagaggctcagggtcccggccacgctgagggaggtcaaggctgaggtctcagcggcgctttcgatgcggtgccgtggacggcgcattattactcacggtacgagtttgaagtgtcacagcgcgtaccaaaagtaataatgtcccgtcgccagcggaggcgtggcgtcttccagaatgctgcgctggatgcagacaggaccccgggacggggcacttctgccttcttggctgatatgaggctccgggcaacctgcccccagttctcgggaacccacctatcctccctccccatcctccctccctggagagggagtccccaccgccttccgcccagattccagtgccccccaccatgcctaacagccacacggcaatgtccactgcctgcccgcctccccaggccaggcacagccagggctgtttacctgtcgggttggggsccaccctggrgggccctcccttgggcacacagagtgtaccgtctgcagacaggctgtgcccctcccaacactggcaccagtaactgccggcggtgttgaygcagcgctggggacagccgcccctcctagcactgcattcatccacatctgcaggaaacggggtgtcaggcggccatgcctgcgggaggggtcctgcccacacagctcccttcacaaccacccactcatgggccagcagtaaccccaggacatgcaaggaggtgcccaggacccttccagggccccccagggtagagccagcctcacctgactggcaagtgtcaccccgccatcctgcagggcagcggcagcggccaggctggacacagctccctcyrttccggcatggcggctggcatattgctgtgggcgggggaggctggtcaccagctcagttgggtccccagcaccctgtgggggcagctgctagggagtgggtgctctgcggcaaggtggtgctttgctcggggttcaagaaaagcagcaggagcgttgctggaagattggggaacagtcgccctcctaacaccgggcgccgagggacatagccctcacctgctccacaggccccaggaagcccgctggtcctcttccagccggggcagcacgcgtagcgaggcctggcaggggccagcccagggctgcggcggtaggcggtcctatagatggttctgtggggtgggtgggacagctcagaggggcatcctactcccccttagtcacctgctgggcatctagagtcccctctcagagtgcacagggtcaccccagcatgcccccaagggtcttctcctcaagggatggcactgaggggtcactgcacagccgtttccctgcctgggccttccggtgctggccgggactcaagccacagcaggaaggcccagccacactccgcatggagcagaggcagtggccaggcctgtgtgtgcccccacctatctggtctcctactgtgggggcatccaggcccagaggagagggtgtgcccggcctacggcgagtcacggcagagtgtgggccctgggcatcggagcccttcttaaacctccagaagtctgaattcccaggcccctcccccagcagggggtggagctcccacacccaggaaggaggactctgagacttaggggtgtgtgccccttgtgtgggcatacaggacatttcagggtctcatctgtgcccactgggggccgtcatgtggaggggggtgcccagtggagtgggaccaggggagtcaggcaccattctgtgtatatgggaacttgcagccagggatgccagggtagggaggggttagtcccccggaagtggaggggtgcagacaggatgggtgacccctctaaacatggggatgctcttagaggtgcggtcctttgagacgtgtcggggcaagagcaaggattaggacactggaggtgatcgtggaaccccttggctccggccgccctgggtcgcccatctcaggcagccctctcatggctctggcctcagtttcccatcttgggtcccaggattcacccccgcctcgcccctgacatgctgatgtgtggccgacttgggaggctggggctgggtgagctcggtgtggtggggcactcaccggtaggtgctgcaggcccggtgcccgtcgcaggwggtgaggaagggctggtacacacgctgcacgaacgactcggagacagggtccccgtgagcccggacagcacacaccctacggctgcgggggtggagagggggtcagcccaggagtcccagagcaggacccaagaatgatgggaacatgtggccggggcaggaccctcagcaggagcccccagggagtccccgacaggtgctgagggccgcctctaggaggtgctgagggctcccggtccccccaccccagcactcccaggctagggcttggctcacccgggccggtaggcgtgctctgtgccgcccactgccaacaccagaagccacatcagcagcacctcctgagagcccctcatggcctgtgcctccaggcggggtggccttctcctctgggtggcctggggcacaaagcatgacccctaagtctccccgcagatgcccccaggacgcgggtgcagtttgcacttgctccgcgaggcctgcccagctcatctccgctggagcctccaccggtgggacagccccacggtggcgcccactctctcctccgctggccccctcttccagctagccagaccctcgccaggcacaaacagctggggccacagcctgggggcacagggggggtgasgctgtccagagctcttggtgcaggaatcgagtggatcctgctgggcatctgcccgaggctccgggaaggatggctccagctacgggtggccgtttctcctgtcctgcctggttccagggccctcctcacagcagggcaggggtgagtttgcaccccagtctatgcaaacggggtgttcgtgggcagagctgggatccagccccaccagggacctgccggcctcagcccttctggaatttgatttctcatctgagtgtggaaccggccccagcaggtgggccagcagctgcaagccagcaggaaccgtgcggggggtgcacacattctaagaccaccagaggggcggccttcattttagagggggtccttcccaggctgggatatgtgtgcaatcagcctccagggatcctgggacagtggctgtgccaggtgcacacctgggggtgaggagcagcccccgacagtgtcaccggaaccggaatccaaccccctcctggctgtgcagcaggagccaggggcccgggtgaggcttcctgagagcatgagagcccagaattaatggtctgtggcaatgccggggatggggattctgtcctatgcgcagccaggggtctggagacctggcgagcccctgccatgctgcagggtcccacccagggcctctcacgggtgcttcccaaaggctgggtgggttccttccgaggcactgcagggccctccgcagggaaaggccaggcttcgggtgggggcagaggctggggtaaggctgtcccttctctgggattcagtttcctcacacactagaatagggtctctgaggcccctcctcagctctgacagccagtcctataaatagtcacactgtcctc

SEQ ID NO: 95322 - DNA, 29555 bp, Homo sapiens
gactaagacgacctgttcagtctcagcttgcttatttaatggtacacaaatttgagcagatcattttagttttttgaacctccatgaataaagatacctacctcatagaattgtatgaggattaaatatgagatgtgttgaaatttgccccagtgctgtcagtacttcttgagttcccatccctttatgatgtccacagagacaaaaggtctcagacaaaaagctagaattatgaaacaagtgaaagtcaaatataataattgaaaaaaatctataggcctttgaaagttataaatacagaataaatagtgctaatggatcattttctaatttttagaaaaggcctttttccctatagagtttatatcagtgcatttttacaattgtactgaagaatttttataaatattttacaaaataaagaaatcgctgttgacaaagcatttgtggacctcaagagattctggatgctgtgtgtgatagatgtgaataaacagacatgccaacaccaacatttacaataaagagcatgccagcctatgctatcagtggcctctctttctcaatatgacccatgggaatacaaacacatatttttctgccgcttttctgaatgggtatgcatttctgcatgaagactactacttcctacccactccctcatactggacattctaggtccctgggcttcctgtttagtggagggttactaagagatgttaattgacaatcaagtgcagaaattcttttatattactaatagtataaccctgtaaccctattccgtgactctgcaatgaaaagggaggatgctatagcacccccaaataaaagccttaagtaatcaaactcacacagttatagacataacttattttaattatctgcttaatttaaatttaagtgatatttgttaaccatacagagtccatggggtaacagtgattgggagtgcctcctctagtccatcatcttgtgcctgagcaaggttactgcacttggaacctcatcctcctggcttggcttccacagtcacattacagcaatcctccacaccgctctcacggtgctctctatccctcttccagcacctcagtgctaccaaattcttcattccctcctcttgtgatgtaacttctaacatcccgtctcatggcagattattagagtgcgtaaggaggaaacagaggtaaattttggttctgatgaagaggtagaaggggtcaggaggtttccatcattgtctgtcttctgcaaggttatctaaaaagtgaagagacatccttaaagtgagtattgaccaaatgtcagttgtctcttcagacttcctatggtttaaaaataaatgaaaagaaaaaagctctgttttcttacctaaatttgagttatattaccaaaggccccttaggtaatggggcctttatacgttccagagtaagtagcatatggtgtgtgcatgcatgtttctctctctctctctctctctcattctgtgtgtgtgtgtgtgtgtgtgtgtgtgtgtgtgtgtgtgtcagtggagagagagagagacgaagaaaagggaggagtgataatccttctaaacgtatacaagttgcttgtgagaaaaatagcagtaatcataacacaccaagtcccttactgctggtaatgcttttcatgtgtctctccagattgcctaattttaacttcttaaatgtctcatctcctcctctataccctggaaaattataatatgctgattcaatttaaaaaagttatttgaaatgtagccaaactcatttgatcttcctcaattcatcactgcatatgggtttcatcccattttattagtaaatttgacactgattatgataaatccatccagtgccacacatctccatctgcaaatttcaaggtttaattttaaactttttagggtaagaggtttttaaaatattttcaacctgtaggatttccaagaccttatttctaaatgtttcaatatgaccaatcttatacatgtgattttatatttctatatcatatataaaaaagatttagattatttaggctttcagttagttctttttatacatgaagctacttttacgagcaagatgaaggggaagtgagatagtggcagttgctgtcttttggatgacaggccaatttacttcttgcttctaaaggaagtaggctttaccctttaaacctcccccatcatatgttcttgcatgtactgtttcctttcatcagtaagttctcctgatcttctctgtctctccctctctctctatctctctctctgtttgactgtttctctgacattacccaaagataactgttttttttttctggtctcagaattattcgatgtcctttagtagtgaggtcagcttccacaaatgcctaattaaaaaaaattttccttaaaataggcaagaggaggaggagttgaattccaaacacctggagtctcctttgattagcagtatttaatttctgatagtacccaatttatggcattttagtgaagacaattctaaaagttaacagagaagtcaggccaatctttccgataggatgacacactcctttgtaaatctttaaatgcttttcattgcattatttgtgagtagggaccagcagtgttcctaaataggaagtgtgttttttgccaacagtaagtcccatagatctctggttttcctgtttagtggagggttactaagagagagtacttaatttctcacagttggaaattttcctggtttctctagaccatgtaattcttcaaaatgttatagggtagaccaagttctgaattttacctgtgcttttgattaggcttcagtttgttttacagattattgtatttcttgtctccttctgtgctttttccacagtgcaggcagtaatcacaatatccttcatagagtgtactaccttgcccttaaggatgttagaaacgcatggtatcgattcccattgtgcatttagataatagcaatacaagcacagaatattatcttggcaccatagaagctctacaatccccaagtgtcagtagtacattttcttcaaacgttagcaacctcaatccctggcaagaaaaaaaacagattatgcaatctataatgatcttactcttcagcaaaattctatttttttgtgttcgttattagaaatttccacagacatattttagcagtcatatttctgcctgcccagctagagtaagctcagtgaggaagggggtctgttgctactcttctttaatgatggaaacactgaggagtatatgaggaattttacccattagatgtgtgaggctaagagatctttgatcatgccactgctctccagcctgggcgacagagtgagaccctgtcccaaaaaaaaaaaaaaatgatatgtccactcattaaaaacttctgtcagaccactcttttttataaatttttaaattttttaatgatctaacaagctttatttttatcattgttaaaaaaatccttcttttgagtaacacaatcacaaagtaaagaatgttatcattgatttaaccagtaaaaaaacaatacttaacaataaaatttttcaaacatggctccaggccatccagatgacttagttatcctcctttgatgcccttctcttcttcgaatgaatcacaatgaggcagaaaaattttcatgggtgcagagtaggtgtatatatttatggagtatgtgagatattttgatacaggcatacaacatgaaataagcacatcatggagaatggggtattcataccctcaagcatttatcctttgagttacaaacaatccaataacactttttaagttatttaaaaatatacagttatgattgactatagtcaccctattgtgctatcaaacagtaggtcttattcattcttgctaatttttttgtacctattgactatccctacttccctactcccctcagacacccactacctttcccagcctccattcttctactctttatgtccataagttcaattgttttgaggtttagattccacaaataagtgagaataagtgatgtttgtctttctgtgcctggcttatttcacttaacagaatgtctagttccatccatgttggtgcaaatgactggatctcattgttttactgcattttgcatatgtaccatattttcttaatccattcatctattgatgaacacttaggttgcttccaaattttagctttgtaaacagtgctgcaataaacataggagtgcagatatctcttcaatatattgatttcctttcttttgggtatatatctagcagtgggattgctggatcatatatgtggctcaattttagttttttgaggaactccaaactttgctccatagtggttgtactaatttacattactaccaacgctgtatgagggtttccttttctccacatccttgtcaacatttcttattgcctgaattttggacataagccattttaattggggtaagagggtatctcacaatagttttgatttgtacttctctaatgatcaataatgttgagtatcttttcataagtctgtttgccatttgtatgtcttcttttgataaatgtctgctcaaatattttgcccatttttttattggattattaatttttttctatagaattttttgagcttctcatatattctggatattaatcccttgtcaaatgggtagtttacaaatatcttatcccattctgtgggttgtctcttcacttcattgattgtactctttgctgtgcagaagatttttaactagatgtgatcccatttgttcatttttgctttggctacctgtgcttgtgtggtattgctcaagaaatctttgtcaagaccaatgtcctcaagattttcctcaatgtttcttcattgtagtttcatagtttgaggtctcagatttaaatatttaatcaaatcattttttatttgattgttgtatatggaacgagatagggacctaatttcattcttttgcatatgggtatgtagtttgccagcaccatttattaaaaagactgtcttttccccagtgtatgttcttggtatcttggtgaaaaatgtctttactgtaggtgtgtgattttgtttttgggttctcctgttccattgctctatgtgtctgtttttaggccagtaccatgctgtttttgctactatcactccgtagtataatttgaagtaaagtaatatgattcctccagttttgttatttttgcttaggataactttgcctcttcaaggtttggtgttccatataaattttaggattttctttctgtttctgtgaagaatgtctttggtattttgataggaattgcattgaatctgtagattgctttaggtaatacggactttttaacaatcttgattctcccaatccatgaacatataatatttttccattatttggtgtcttcttcaatttctttcatcaatgttttgtagttatcattatagagacctttcattcattggttaattcctaggtatttaattttatgtgtggctattgtaaatgggattacttttttatttctttttcacatttttcactgttggtatatggaaactttgctgattttggtatgctgattttgtatcctgcaactttactgaatttgtttgtcagctctaatagttttttagaggagtctttaggttttattcaaatataagatcttatcatcagcaaacaaggataatttgacttcttcatttccaatttggatgctctttataccttctcttgcctggttgctctagcaaggtaatatgttgaataacagttgaataacagaataaaaaaaaatctctgcaaagtaaacaaatctcactagtttatctgacttgtattccaaattagtgcttctggccttttcttaaaactttaagcatcacaaggaaatcagttggaagggaatcatgtgctgatcaagtccttaaagggcagaaatattcactgaagtgaaaaggattagtaaagggtggaaaaaaagaccagccccccgcctagtttgggtgagcagatttgggattaattatcaggcagcaatccacatgcacttaacagttctgacgtgagakgacaagaaacacaagcaaatataaaacattcaattctaagagaagttcatcagagacatccttcaggattgtgaggtactggaaagaagtcctatggggagtgggtggacacgtgccaaaactccrttagtgtragggactttaaatcacagaaattaacttgctggaaatctgttcccaattcttccttcagctccaaggttaaattaaatgtaattaatgatggtgacctgctaattcatgcttttgataactgatatctagtatgtatatatatataaacaaaatgacgaggacagggaatttaattatttgggtatcacacatgyaggtgttatatatgccaaattttaaaggtaaattamtacttttattatttgtgtgaaatgtcattttacatatgggttccattttgaaagtggtttgggaagggggcataccattttaagtaccaagaaaaacttgcataatctcattttactttctctttttcagctggattttcctctacgtgcttcagtcttctctacacaaagagctgcaaaccaggtctttgttttgcactcttatttcaagcagaatgagtgctcctaaactcctctctctgggctgtatcttcttccccttgctactttttcagcaggcccgggctcaattcccaagacagtgtgccactgttgaggctttgagaagtggtatgtgttgcccagacctgtcccctgtgtctgggcctgggacagaccgctgtggctcatcatcagggaggggcagatgtgaggcagtgactgcagactcccggccccacagccctcagtatccccatgatggcagagatgatmgggaggtctggcccttgcgcttcttcaataggacatgtcactgcaacggcaatttctcaggacacaactgtgggacgtgccgtcctggctggagaggagctgcctgtgaccagagggttctcataggtaagtggagatatgaatgagttcataagtcctgcatgagactcaaggctcttaataaaatcttaaatcatttgagctggaggaatacctggaaatcatatagctcaaccctctcttttcatagttgaggaaactgaggcttagaaaggttaagaaacttgtttaatgtaaagggttggagttgaagctcagaacttctgatcaatattttattctgaaacatttattgagcaaccactatatcctaggaactgtgttaggtattatgactagtcaattcagtaactccttcaggtaaacatgttaattgtcatagatgaggttcagaaagttcaaatccacacaggtgatatttagtaaacctggaattcatgctgagatctacctagcccttatattttagttctgcaactacccctgctgacccttaaagaagtttcccaccatgatgatcaaattcagcatttgagatgaagagtttggcctgcagactaaatagcattaaataacaaagcactaaacagtaacagccaacaatatttgattgtgttctatgtgcgagatagtagactaagggtttaaatgaacatgtattgagtccttactatgagttaggccttgggctaattgctttttatgtgtgtggtctttgaactttcaattctgtaaagcaagtattatttttatccacattttaatgattaaaaaaaaactaagacttggaaaaatgtgcccaaagtcatagaataattctctggtcttaactactatgttatatcacctaattttcaaagatttataatgttaaaaagacagaaaattccaacaaaaatgccaacagtgggcagaaatcaacatgacaaggtcacagaaacataaaatccataggtaagattaaagaaaggtaatataaatcatgcagtaaattggagagagaaaagggaagaaagagagagaaagcaggcttgaagaaagggttttagttaaggatatttttaaaagtgtaaaataatttaaaacacatttgaacagatggataaatgggtcgtggtgtgttacaagatgattatgctctttctctacccatccccgcaaggcagatgttttcatgcttgaattttgtatccctaaagtcaggagaaatcttctggacttaagtaaagaagaaaagaaccactttgtccgggccctggatatggcaaagcgcacaactcaccctttatttgtcattgccaccaggagatsagaagaaatactggggccagatggcaacacgccacaatttgagaacatttccatttataactactttgtttggacacactattactcagtcaaaaagactttccttggggtaggacaggaaagctttggwgaagtggatttctctcatgagggaccagcttttctcacatggcacaggtaccacctcctgcgtctggagaaagacatgcaggtatgtaagaagcatttcrgtttkcagactctttacagacaagatgccttgtttgtaagtgattttaattcactagttttcagaatcatcagaacatttgatgaaaaagcaattttatgttactaacctgtctttggcatttcgttttctccttattttggttacttgttaattaatctttatcttggtgaagtgaaaataaagcaaaatcaataatgagcaaaatgagacatttgcaggaatgaattaaaagtttaaaaatattttgcagtttcattgaaaacatgactttcataaagcttgaaacagaagaatctcatttgcatgtcttccttctctactaaatataagcagattcctcctcctggtcaagtgatgtgggttagagacttctcaatctttccagtcctaaatgtatatctcatcattccagcgatgattccctccaacatggtatagggtttaaatcatgaaaaataattcctttcaatttagactctcatattttcattgaactatatttttccacgttccctaccctttgagtcttacagaagaaacctattaaaatatcacatcactatataagaggacagatattttaatttgcttggctatagtaatcactttactatgtatayttatatcaaagcaccatgttktacacctaaaatatgtaaaatttgaaaaaaagttgaaaaatatcaaaataattatatcagtcaggcaatatttttagtgaaaagacattggctttttatttggcacaaagtgaacctcaactcaagcagttatttcatgcttattttctaagcagataagcttcaaacatattaaagtatctagttacgtagattctttactcttatttcttttaccaactgctctgttccttgagaaaaatatggaaattttaaaataaaagtttaagttgttagatctcaactaggaaatccacaaagtaaacctgttttctatgtgaaataacagcaatgaatctcccccttcaagttaagatataaaaattaagctaaaaatatctgaagaagggaaaggcgtttagattcatttattaatttgcagaatgctgtgccagcattattccgagaaaaaataaatggttagaagagagagaattaatgcactaacatacaggataaaatattcttttgaaagtacactatccatttgcagtttgagagtgattaaatgaattcatctgatactctgaacgtcatattttatagctctgattgcaagtaagacatttagtagattatagataaatctgtcatttgtaattgactgcagatcttcatgccttcaagtcattttctcatgggcacaccaaaatgaaagggcaggtggaaagtatctaaaagcttcaattttgcctgtgtaaacttcaacctctatgacttacattttaaagacccaacagcacaagggatgcaacaaattagaatttaaatgtaattcgtggttgaaatgccacatgaatatgctctggctcccaaatgtcagttgctgaaccacaaaccgattcttaatgatcccttggaagctgtcactaatttttgtgaaccacaatgatggcttctaaaggaggactacaaacccctggagaccaataactggggataacttggaaagcttttggctctctaaaacacccaaggataagaaaatgcttcctaggaagggatttaaagtgaaaaagtagaaatatactgagtgcttgagagataagataaaacaattgcaatccctacatttaaatcccataccataaatagaacttctcaaggcaccaaagaaatgagaaataacaaggaaatgtatgttttaaagaaccgaatgaaataagcatgtgatcttgaggccagcatttttaaaaatgtgagatcagctttgaatggaaactaggtctctgatctaaaaaacaatgggcagaaagatttactctgcttctgtttagcatttttatcagtataaatttaggcagaagcctgagtcttaaaagtttagattctaaggcagggttccctaaataaaacaccttccgtgctcagtgtgaaagagtccattggcctgttgccaaaccagaatctaaatgcctagtcattcaaattaaatttaaaaacagaagcaaaacaaaaattagcactccacaaaacatattttaaggctggatctggctccagactaagagttaatgatgcttgaattaaagataggaaaatggaagaaggtggaaatgccaagaagtggatgttgttattgataacttttttgtataaccaatataaatgtaattatctgcctaaaaaagaaaaagaagaccctttatccctttaaatcattttcagaaatgtctgcataatgagttgagtttcattccctctaatgcctaaatgacaccttgtaataaattaccagctttgttaaataaggttttaactcctctgggcccctcagacaccrttgatatrctaaccagtaccttattgtctgaagagagctaayagaaatagactgtcagagagyagaccaaacagaaatgaataattgtaaacagaagcagagagtattaatgtggtttctgtgatctaggaaatgttgcaagagccttcyttctcccttccttactggaattttgcaacggggaaaaatgtctgtgatatctgcacggatgacttgatgggatccagaagcaactttgattccactctaataagcccaaactctgtcttttctcaatggcgagtggtctgtgactccttggaagattatgataccctgggaacactttgtaacagtaagttccaaatgatagcttggagtcagaatttctttttagataaagagattaaatatgttgcctgaaaggcccttcattctactagagaattcagactaaaatctacttttattatagagtaacagtgtaccaggcattcattaaacacctagaatgttcaaggtactctagaagttgctccaggggaaacagaaagtgcctacacatttttacactgcctttcttgagtagtttggtcaatatcttgctaactttcttattttggaaatgtctagttgtataaactaatcctcttagttttcttagcactacttagaagtcatgtgtcttgtgttggaatttcacagaaaatgtttcctaagaaaatgtgaaaaataggcaaaaagttggaaatgccctgggaagaaaaaaaagaaaagaagcaaaccaaatgtatgcttgcagttataaagttagaaaacaaaagctgatatgggggatagttttcagaaaaggagtatattgtactgatgtctgccccctagctgctttccagctcttccaaagtgaacacagtaagagtacgcctaatcagttgtcccagcatcctttctccagtgatctgaatgccaccactgtcacaggtcaagtttctgccacatgtagatctcttcctgagctttctgttctcctccttggatcatattattatttgtgcctgtggtagtaacacaaggtttaattattagacaccccctacctcatcttatttttcttcttcaggcatgtatggctcttttgattgttcttccatataaaaataagagttatgtgaatttgttttcttattataatcaccacatacttattctacatgtattattttatgcatcaagtattaaattattttatgaacttaaataagaaatactctaaataaatcagcaggaattagatacatattttcaccattagattatttagcaatgtataggaataagagaagtgataatatatgaaaatttcctctgtagaagtttaaaacttagaataaatttgtatttgtttggtatgctgaatgcatgatcccaccttgtggcagagaactgaaattgaggatcaggatgtctgcagatgccaaaaygtttatactctttgtgaccaggccattgtattttggcctgagagttttctagacatttcccaatcaccctgatgattggataccaaaataaaacacagtttaaatgagtgaatgcaatcatagcacaggagggggaagaaagaggaagagattttcttttcatcataatttttcttgtcaattaatataacaagtctcctaactcagacacatagtctcatgacaaattgaagaatatttattttaggttaaaatatttttaagattatcccttgtctcactgcaagagataaatggcagacattttatttataaggcaaaggaaagggaaaaactatcattttattgaacatatattatgtatctgatatagtatgaaatgcattgatatagtatcctatttagtcttcataacaattctctcttctattactgttcttctttaatgatcttgtccatttctgtagttccattcgtcatcttttactggagacccacacgtttccacctttagataaaaccttctttctttaaatattccatacccatgtcttcacatgcttgttgcatagtatttctccaatattcaaaattaatgcgccaaacttggtggattgaaaatagttaatattttattgcagctaacgttcttccagccaccaaaataccatctttgaatcaacatagaaaaacactgttctttattcacagtacttctcaaatatattttcttcttcagacatgggcaactttccatttatttttatgtggaaattccacaggactttggtccataggatgttaggtgcaatggcagagtttgtccatatgcaaacaaatttaagaatcactggaataaaaaacaaactggtttattttttatataaactagtttctttactgtcagcattttctacaatggaactctgtgagggcaaattagaatgtaatgttttgaaactcaagtaattaatatttgtttcttgggatttattgatagcttcctgagcagtaatccccaaaacatcagcttgaattgatagtctagctagtgatggtgaaagttttgggtgataatgtacactcaataaatagtttccaatcccacctgaggcatatgttttagttacatattatttaaatttcattatgctaacttaacaggttctgattattacgttaattataaagcatagaacatgggaggctttctgaatgaaggaaaaggaatatgagttgaagttgtaaaattatctctcaccagcttagtggattgttttgcttgtccctttacggtacatatattcctttctggagaccactgggacagaatgatgcaaaattttcctaaccaatcacctctcctcccacccatctaaggttttgacttctctccacttcctaataaatcacacataactttcttatcttgatacttgatttttttttcacaatatagctctggtctagcttcttttctttcctacagtccactactatcctggcacatactccaggcaaactatttcccaaacaggccctccccctttttttgtttattttacagctaacatgatcttttccatataatgacaggcaccaaacaactcttcagcacctattcaatgccaggtactgtgccaagtctgtgggatacaaagtttttttttgttacagatagggggtgtkatagacagaagaaagtgtatcatctcttgccatttcctctgcctaaaatgtttgtcttgtaaaatttatttcacctaagaaaatttttcttaatcctatggggctttgtgtaaatctctcttctttataaagcctttctggagatctgactgggcaggatctctctctctctttccctgctccctcccaccatctctcttctttaaggctcctatcatattatctatccctagtatcacagttctttgtttgttactgcccttcacaaagtttcattatttctcacattaattgctgaaaaagttgaaaaatgtgtgttggttgacatatgtatcactttccaaagaaatgtaagggttttttttttccttatttctctgaaggtttaaatagacagcatttgcatacaaaatatcacatatatgtgacatawagattttagtgtagaactagatttatgagattattttggcaaaattcaattttccatggaattttcattttaatacattcttgtggaagaagcatatattgatttaacaaatatcaacacctgtatctgttagtgtgattcttttttttccttcagatacttttatgtatctcatatctacttgattcaaagaaatgggacatggtaacttagattttctcattttaatgctaccaagtatgcatttttaaattttcttttctaccaaggaaaacctatatttcatattcatgctatgtataaagttttaaagagcgrcaataagaactccaaacattgtgtaaatgtttccacatcccatttttttctgcaggcaccgaggatgggccaattaggagaaatccagctggaaatgtggccagaccaatggtgcaacrtcttcctgaaccacaggatgtcgctcagtgcttggaagttggtttatttgacacgcctcctttttattccaactctacaaacagtttccgaaacacagtggaaggcaagtaaatgaaatcagtatttttaaaagatctagttatcagagaaaactgaattattcaaaagcaagtttctttgagaaggctttgaatagtatattaatcctgtgtgtttatgtgaatgagattttctattatgatacacctgcttgaaaaaggaactttcttaaaaagaagagtcaaccatgaagctcttttcattataggtgaagcccttggaaatcatgctctaatttcttaaacacccaaaaactttttaaattcaaatttctggtagctagctggccaatatgtaactatatcaaggtctctagcattggcaaacaatattcaagactttgacagtgtattaaattagtttagttttttttttaaatagagtaataaaaaaaattccaaacaattagttgacactgagtaaagccttgcttgcgcatatgttttatttaggtcmgtattaacctgtaacttttttcaaaggtctgtacaaattcaaattagcatctactgatgcttaacttggttttccttatttcacacaaagtattttaaagctgaggaaagtgaggtataaacaggtaaaattactatcacaagatattcagctagttactaacagagcgtaggttcaaattcaagttttcaaaatccagtgtctttgtataataaattttgatacctccaaatgatgcttgatatatatatatatttaaagtcttcaaaagaatataattayttttatcttataaacttgttattgttaaatttttaccttcaatatagcattgtccatgtctaatgcatcccatctccccaaaaaatgcaaatacatttctctgccctatgatcagagatacttggtatacaaatctaataattatttttaattctctcaccttttagtctcaaaattatatgccatwttaacctatttttgatcattttaataactacctgaatgcactgatttgaatatgattcaataaaaaaaatcactatattttggctaatctgtaaactaaggccatcagcactgatgttttaaaaratgtacagattgtgtcttcttaatgcccaatcagaagacaattatacttatttcctgacaaaatgtataaaaagacgagtgtcaagccacgttccatatatatcacagacaatctttaaatgtttttgagtcaaataacaatggaatagatgcttgaaaaaatgcataggtggctaaataagtggctacaactatacaattcatcttagatgaagagagaactggttaacatattttaaattctgatttcattttataatgcacaacaattccctgatctcaaccctctggtccttcaacccaattagacagcctacattatagaccctccatttttatttatgacctgtcttataccaatccttsttttctcccttatatatggaatatatatatatatgtgtgtgtgtgtgtgtgtgtgtgtgtgtgtgtgtatatatgtgtgtgtatatgtatatatggaattgagatatttatcaaaagctgtataaatgttttgacagtaggttttcccgatgtttaaaactagcacaaagatggaaagaaagccctgaggaattgtagcttccccacaaaaaatagttttccaaaaataaacgtgctaacagtcattcaaaaataaggtaggaggctgaagtaacatctggcaacttaagttccaagacaaccagagcattcttctcccaattgtgtcagcagtttttagcagaaactggagattttcactatctttattcccatgtagaacaatgtctgccttgtcaaatagagtgtctatatattttgactggtatcctttgcaggtcattatttttaacctggaggctacatttagaatgtcatgccactagcataaaaccagcctagctctgggtatagcaaacaaatgtcatcaaccataggtacagagaagcagtgctgttatattaaggcaaaaattggcctgacgagccttgaaaaaattgtttcccaatataatcattgctattacctggaaaagtgaaatatttgcaatagttttactattctcctccttaccaygtgtctaggttacagtgaccccacgggaaagtatgaccctgctgttcgaagtcttcacaatttggctcatctattcctgaatggaacagggggacaaacccatttgtctccaaatgatcctatttttgtcctcctgcacaccttcacagatgcagtctttgatgaatggctgaggagatacaatgctggtaagacattttcatatgcyttttgcatgctcagctgggcggattgtttagatggcatagttatcagttcaagctgagcactcagcgcataaaaacactttcaaaataaggatagcatagctgtaatatcaagtcacttccagacattcaattctactttgaaaatgcaggcaagaagtctctccaaatagttattataggatgatatttttaaccatttgctgggactaaccaaatcatctctcctaatttttgctacgaaaaaatggctactatgtttcacaaattgttcttaccctcatcttccaacataaattctcattacttttaaatataaatgaggaaaaccttatagagctcttctttgatatcccaaaagactaaaaattktatacccataatccacagttcttatttttattacttaatggcccctcacaaatagaaattgtgttccacttgaaaagttaatgttggcttttatatcacactataggaaatctcttttaagttmatttcaatgcattctttaaaatactatttaaaaggcctctttctctgccttcctatgcagctgagaggctagcattatttttcaaacaataaaagtgcttccactggttaaaacatcgcaaattttcataggttgaaagcattctaaattttggcttttgtgcctttagctcataacgcacataaacctgatattgtagcttaactacctattgatttatgtatccattaggcatgctttcatttctatgtgtgtatgtgtgcaataacgtcctctaatccaacctaattaggaccattaattgatgaaattgatgaaaatagtttgttccatcaaaaattatttaagaaacaacttacacataagcctgtaatcgcagcactttgggaagccgagatgtggggatcacttgagcccaagagtttgagaccagcctggtcaacatggtgaaaccccgtctctactaaaaatacaaaaattagccaggcatggtcatgggcacctgtaatcccacctactggggaggctgaggcaggagaatcacttgaccctaggaggtagaggttgcagttagccaagatcacaccactgcactctagcctggctgacagagacagagttagttttcaatcagttatgaattcagttattgcagtttcatctcattttcatgtgtatttatatacataatgacaaccataaatctataatttacactgtcagcttttttaaaagtgaaacaataaatgagtgacttttgaaatacaatatgagggcaaatattttagccatacacctttaacaaatctttccaaaatgttcaatttacatactataaaaacaacatccttctctttgttttacagtcatgatgaccactttatgtttgtttaactagattacttttattacagtaatgagtaaactcaaattaataggtttaggaattaacaaaaccagcttttgttaaacatgcacttctgggaactacatggcaatgttcaagttgtatttatycagttattcacaatgccgtgggtgttagtaaactttttagaggaaatggagactattcagtaacctggcaagtctcttaagtggagttttctttcacctatgaaagaaaggaaagatattccttcaccttgtgtatcttggctgaaaatataattatttcacattgatagcaagttgttaaaggttctccagattttaacttaaaggtcattgatgaaccagaaaaataccttttgaacatttttttctgacattttctttgtttgcaatatgtgtagcataaggtttctcagtaacttgaattgtagtgggaagagaaataccgtaaataaaaaataggaaactaccctgcagcacatttctgataaaatgtggccataaaattataggataggtcaatgtaaacacttgcaaaytgcatgaaagctaagctgaaacaattagcctccttcttaaatattccttgtacctgcaaatacgttttagaaatcagtgtcataaaacaactgtgaagaagagaaagaaaaattagaaagattaaaaaaatttataaaactgtctgtaaagcaagagtcttgtttaaaataagtctaggagtggagggatggaattctttttcaaaatgattgaaaggtttttacaaatatagaaagctctttacaaattgcagaataatagaattattaggcttggaaaggaacaaaaattacactttacagataaagaaaagtggagtcattcaaatattaatgtccattacaggttcctttcattagacatgaaatagtacaattgagagcatccaaactctagttactaccatgttaatttctatttactaacatttctgatctatatacacattcaattcaattccttctcttttatttcaactgagaattatatgaattaagttttaaatatagcagcccagaagttcagtgtattttcagaagaagcagtttatacgtttccaagagtgatcactactttactttttgagctgtgagagaaatgaagtaatcacacgtacacttaagtcttttcatatatattattttcaaatctactatttcctggtcagtattcaaggtaccagaaatacgatgctatacaaaattcaccaacaaattttcttcctgaaacttttcttcctgttgataaaattgacaataaccatatgtaaatacatatacagcatgttagatggtggaagtctctatagacaaataaaatcaggaaataggataggcagtactgtgtagatatatggaagaagaatgtcctaagacaaaggaacagggagccaactgtggctggagtagagtggggtctggggagagagtggtgagagatagtaaggtcaaagggataacaggaggcagagctgtatgccacagcaaattacaggtttatgttttctttggctttgaaaaatacatttaatgaattttattcaaattgctttatgtaatttttaaaaattattcaagatcaccataggtgatgaaatactaaaactcccctgcttttaaactctcttttttattaagtggtatattggtactgtattcaaagcattttctgttttatgtaatttctcatcctgctgtagtgaaacttcatatctttattcagtgtaaaataagaataaaattttttcaggttctccttgaatattggatgcctttagaactcaataatgataggaatattaattttattatgtttattaatacgttgtctttggaataatttagatatatccacatttccattggaaaatgcccctattggacataatagacaatacaacatggtgccattctggcccccagtcaccaacacagaaatgtttgttactgctccagacaacctgggatacacttatgaaattcaatggccaagtgagtgttgaaagtgtatttttactgtgataatttccaaaarcaaatgtgttatctttcaagtagagtaatcacggtattctgaagctatgttttccatttggacttggaaactttcatttgtacttttatttgaggataagggaaggaatttgatatttgttgagagtccacactaagctgatattgatcttattgtacagcaccctatctcatttaatcctcacaatgctttggggtgagtatgaaaatcttcatttcacaaataaggaagctgaggcttaaataggttaactgttacagattcacatttctaatgagggaagagaatgagtttgagcttaggcccatggaatatgccccaatttttctactataccatattgcctgcatttatctatcttaaaggaaaagggagtgagatactcttaggtatttttctgagattttgaagttcaaaagttttttgtttaaatcttttccccaacaaaggcagtagggcatagtggaaaagtacaagacttatattctaaaatatccgggctccaaagccaactttattgcttaccaaccaagtgacctgggtaagtgactcagactcattgagtcatcattctctcactttcacaaaatgaaatggaaataacaatgactatcccaatagggtccactcattaaaagaaatcaggaagtggcttcaaggccatgtggccaatgtaaattaaatatgaggatttctgttaaaatagacatttctaaatttcatstgtccactttttggtgataactattttaatatttgtctttttatttttaatcttcctttccaaataggtcgggagtttagtgtacctgagataattgccatagcagtagttggcgctttgttactggttgcactcatttttgggactgcttcttatctrattcgtgccagacgcagtatggatgaagctaaccagcctctcctcactgatcagtatcaatgctatgctgaagaatatgaaaaactccagaatcctaatcagtctgtggtctaacaaatgccctactctcttatgcattagtatcacaaaaccacctggttgaatataatagattgagttattaactgtattttctttcactttattaccttctttctaatacaagcatatgttagmattaaagttctaggcatacttttcaaagctgggaagaccctttcagaatcttttcaatgggttttaattttcagttctatttaaaatggtgaatgacactaaactccatgatatttaaggatagtgtgaagatctttggcatgatttaaaggttgagtatgtgaagatataagtgaactaccatgctttgtttacgtgtaaaggaaaataatgtttgatagtaaatgtccacttaaaatacatgaatgggcatttctaaaatgttaaaacataaacwcatttccattcatggatatttgtcaacagatttaaagaaaaccacagttattaattaaagaaaattatgtgtagttataaaccaatgaaattttgattaaccttttcaaattaatgttccagtttgaagaccaatcaaatatattatttagtcaacatatactatttagtctcaggttcaaggctacaacaaaaatcaccatctttgtcaaactttggagagggaaaatcttcactttcttaagcaacaatggatattgcctgtgtttgccactgtgtttccctgcctctcaattcgctgaaaaaggaactacctatccttacatttcacctactaatgtctcttctaacatcttagaggtccatggagaaggcatatggagaacatgttttatactgctctataaatagtattccaatcactgtgcttaatttaaatagcattmtcttatcatttatcagccttttatgtattttccaagtaaaatattaacatattayttcattggtcttcttttttatctggttctatatgaatgctattttttcccttctcttctaacatgaaatatattttctctttttgatcttgtgctatgaaacaatcttccaaagaactgtataaggtggtcataagtgaatattttaattaaaattggtaaaaataaataataataacagtaataatcatgcactatagaaaatggctaaactgagattctaaattctacaaacagaaacaagtttaagttatgtatccctgattggttactgggttttcctatattcaaaaatattaaggctatatatacacaagataaacaaayaaaatatatcaaagagcatgcatataacaataggatgttttacactagcattattcaatttattctcttggaatacattgcgatttgttaaaatacagtatactcacagcttttcaaagaaattactgtgtaatgtaagatgcctttttatatagaacatcaatgaaactaaatacttcactttatatttttgtagacttactaattactcatttcagaaacatttattaagcacatactagatatcaagtatttcaaggcactatagatttagagagaagaaaataagaattgtaaaattgagaaggtcatgtttgacttgtacttcaaggactgccaatggatttaccaaatatagaagcagagaagggaattttattcaaaagtgacagcatggacaagggcacagaagtttaaaagagcatggaactttttaaaatataaaataggtcagtgtgattacagtatagtttttatggaggggagtaaaaagataaattggaaataaaaccagagtgtcctatatgcaattcttaatacttggaattaattccatgggaaataggaaacagggagagtcataatcaagctgtatatttataaatatagtagtgatggtgctgttcacaaataacgttgatgagaaataatttggaatggttaaaagcaaagaaactcattaatatggaatagattgtgggagagaggagaaagccttgtttcaaagcattaattctaaataatcataattataagataaagttgtacacatctataaataaataaatacagcttatattataaatactatataatattgaaattataagtataatataaatatagctttaagtaaatcattacaaaaatgtcagttaacaatggaagactgtgagagagaggattaaaacaagagcaaaacagaaaactattaacaaaatggcagttagtaagtcctcagcaatcagtaattattttaatgtaaatggcttaatatcccaaataagaatgcttaaagtagctgagtgaatcaaaaaacatgatccagtgacttgctgtctataagagactcactttagatttaaaaatacatataggctggaagtaaagagatggaaaaggatattatgaaaatggtaaaaagaaaaaaaaaagaaagcaggggaggctatcctatcagacaaaatagacaaagtcaaaaacttcctctagaggtgaagttcattatataataataaaagggtcaatttaacaagatataacaattgtaaatatatacatattcaatatcagagcacttaaatatacaaagcaaatgttgatagatctgaaaggagaaattgatatcaatacaatactagtagtagaatctaatattccactttcaataatgtataaaacatccaggtaggagatctataaagaaagagagtacttgaacaacactgtacaccagttggactttagggacatatacattacataccactcaacagcagcagaatattcttatacttcagcaacatgttcttctcaaacacaggtggaacatactccaggataaattacatcagacctcaaaacaagtccccccaacattaaaaagataaaagtcatttcaaagatcttttaagatcacaattgagtaaaattagaaatcaatagtgcaagaaagtgggaaattcacaatgacgaaaaaacaatacactcttaaataaccattgggtcaattaggaaatcataaaggaatttaaattatatctcaaggcaagtgaaaacaaaaacacaacatatcaaaacttacaagatccagcaaaagtactaaaaaggaattttgtagcaataaatgcctacgttgaaatctaaggatctcaaatgaacaacctagcttatacctcaaagaactagaaaaagaacaacaaactaagcccaaagttagcagaaagaaataaataatgaaaattagagtagaaataagtacagaataataaaacaagagaaaattcagaaaattaagggttttttttaaaaaaataaaaaaatggacaaacccttagctaaactaagaagaggagaggactcaaaatcagaaatgatagaggaagcattaaaatgtgttcctaagaaacaaaaggatcagaagaaacttttataaacaattataagccaacaattggataacttataagaaatggataaattcctagaaacatacaacatactaagactgatttcagaagaaacagaaagcctgaacataacaataacaaacaagaaaactgttgcataagcacccatttcttgttgcataagcacccattgcatgtgagtgctgcaaattgatctaagctttatagtctaagtggagtccattaaaatatctgactgtcctacgcgtgaaaaataaaaagctattacttttttggccctcagttatatcttgtcttcatgtccagaagcagatttcacacatagtgcttacttacaagtccacataattttaaaacatgagaagataagtttggggctattaaaatactgttccagggttcgtttataagacatttgtttggagctaagtccatgaatatccaataatgctatgtatttttcctttgctatagcctgctcaaaattttcacaaccaactgatcaatggaagatcaagttgagcagagagctaatatgaatgtgaaaacataaatttaaaaaatgtatctataaaccaagaacagagtctgatatgaaatagacaaactttaataaggaaaaatgcaaaatccggtagttaaaaagcatgatggcaaaactgaagggtagaaggaggcaggagtttttgcaaaataaccagggaattttaatttcaaattaaatataagccaatagtgcaatgcaaccgataaagggaaaaatcaaatacaactgatcaagttggaaaacagtgagctattgggcttcattaatccacaaaaggaaatatgtggtaaagttggaatcacacctggcctatttatacaactttcaggccacacattaaggggaacattggcaaactgatcttctgcctggatgttttatccattattaaaaggggaatattgaagtctaccactattattgtattgctgtcaatttctccattcagatatgtcaatatttgctttatatatttaaatgctctaatattgaatatgtatatacttataattgttatatcttcttactgaattgatcattttatcatataataacctttatctctagagacaattttcaattttaagtctgttttgcctgacataaatatagccatttctgctttctttttgttaccattttggaatatctttttctatcttgtcactttcagcctatgtgtatctttacatctaaagtgagtttcttgtagatagcaagtcactggatcttgttttcttcataattcagtcttgacgtattgttatattagttcattttcacagtgctataaagaaatacccaagactaggtaatttataaaggaaagaagtttaattgactcacagttccgtatggctgtgctgggggaggtcaagtaacttacaatcatggcagaaagcaacggagaagtaagtaccttcttcacaaggcagcgggaaagataaaacgaagggagaagagcctcttataaaaatctccagatctcctgagaactcactcactatcaagagaaaagcctgggggaaatcacccttatgatctaatcacctcttacctagtccctgccgtgacaagtgtggattacagtcagagatgagatttgggtggggacacagagccaaaccatactgcttgtatatttataagaattcatcaatttcttctatattatccaatttttggcacataattgtaaataaaagtcccttatgatcttttatatttctgaggcttctattacagttatttttgtccctattcatcaaggactgaggcccctacaaatcccctcaattctcctgcatttaagtgagtgttcttaaagaaacctttgttcccaaaagatttttaaaaaccatatttactgtaatattatcaagatattacactaggagccatactttacccatgttttctttggtttgttggttcctaatttataactatggggtagtaaatgtggtatggaattttagcaaagtagaaattaagccaaattcatttatccttcagcacagcatatttctcaaaagtttcctatggaaactttcttataaagatggaataaatctgagtattgtccagtctggctctttcattattcagatgaataaattgcattacatggaggtgaacagattcgtacaagacaatacagctaataagaacttactttcatattcctccagaaatcatttcatttggtaagagggaatacaggataatgcagaaattataggatatggcaaggatataacagcacaaaacactaagaagatgtggttgtctcataatcatgaagatcagaataacgaggctacttaacattgtttcaccaatttctagtgcagtgaacagtaaatttttacaagggggaagaatgaacagacccattttactgaaatatttcatacatatacgaaattgaaagataaatgagacacaatacagttataaggaagatgggaagatgagattgataagttcctagataaataaatattgttgactgaacctatagaattaatacaggattaattaagtattaatatctattagaaatttttgcagagataacttaagcctcaaaaaaggttggaaatatgtaattatgtacataaggtatcacacgacatgctctcaaaaagtaaataatttgaattttgatttgaataagatatgcattaattgtataattattttcttagtacattttgaaagttttgggaaaacagagccaaatctttgtatagttccctatccttatcctagtggaatgtcttgcatgtaataagctttggataaatacttattaaaaacactaataacggtttgaagagaagaatgacgtcaatgcaaataaaggataataattatgatctcagggcaaagaggaggattagaaaatcaaaatttttaaaaaactgattatctagagagcaatattctgggaatgcaaatgtttctattgttgaaaaaatgtaccctataatcaagaaaagtaggtcaatagttcctatggccttaaagaattctacagtcttacgattttattctctattattccatgcttaaatagtctaatctattgatttgtctgctttttataacaggaaaagagaaaaaaaacacattcacgaatattctgcaaaataaacacaccattattcactaataaattgtctttctcttatacctggggatgccagtaatatacacctttactttaggacctatcttgtagccctgaatgatttgtctgttaaaggttctaaatttcaccattgttagagaagaaagattcaaacctgagctagcttaaataatgtctgcaactcaccaaaaaaattcttatctattggaaatgacctaacataaagtaagaaatgatcgaacacaaactacattttatgtcaagtgaaggagacagaagaatgtaaaagttatatctccataggaggtgtgtggaatgtaaaatatcttgtgtgtgggcagtaaataccttggaggtgtgtggacagtaaaataccttgtcgaaaggatatattcagttctattagattagaggaattcatccaaaaaggattataaaacaccaaacaaattaaaaagtgggataattattaattctagggaaacagccatttgtttcagaaaagaaagtcattgtagtgtactatgtagtatgctgtaaacaacaaaaattccatctaaatagtaaaagaaattgattaaataataacaaaaatatgatataactaaattgaaaaatgtaagcaaggatgaagtaaaatatgttggtgagcaaggctatgaaaaaagctgagtcctcatcatccaaggtagaatatcaaaacttactgtctctaaattttttaaaaagataaaaatacatttaaaaacagaggcaaaattagaagaaataatttgaagagctgaaaaagttgtatgaaaaagtgtcatctgtgtataggaaaggctggggcaggagaccttgatcattctttatcagccttgacttttttaaataaaaatttttaaaaagcaggtgatgcttctggaaacctcggtgaagaatgatttatttcagaatgtataacactaaagcagaagttcattcttaatgtgttctcctattatatagaagtatgtagacttctaatctggggaaaagagaaaaaaggacatggctttcaaatagaaacttagcaaaatgagtaagaagagtcattaa

SEQ ID NO: 95323 - DNA, 82436 bp, Homo sapiens
tggacagatcccttatgaatggcttggtgccgtcctggacagatcccttatgaatggcttggtgccatcctcgacagatcccttatgaatggcttggtgccgtcctcgacagatgccttatgaatggcttggtgctgtcctcacagtaatgattgagtcctcactcttagcacctgtgagaactaattatttaaaagagcctcacatctctcccctctctcttgcttctgctttcctgtcatgtgacttttgtacatgtgggctcccctttgccttctgccatgagtggaagattcctgaaaccctcaccagatgcagatgctggcaccatgcttcttgtacagcctgcagaagtgtgagccaaatatacctcttttctttgtaaattatccagcctcaggtatttccttgtagcaacataaatggactaagtcaatgtcccagctctggaataggcctttctgccaggaaccctttaatgaggaaaggtattagaggtcgggacctttatctcttggttatctacttgtagataaccaaattcattgttttctagtttattttctgtttctttttgtgatgataagcagatatatgcatgttttcattttctcttttttcttatacaacatgtaacatactacatgtgtacattactgttttttttttgtttgtttgtttgttttgacggagtcttactctgttgccaggctggagtgcagtggcgtgatcttggctcactccaacctccacctccctggttcaagagattctcctgcctcagtctcctgcatagctgggactataggcgtgcaccaccacgcccagctaatttttgtatttttagcagagacagggtttcaccatgttggccaggatggtcccaatctcttgaccttgtgatctgcctgccttggcctctcaaagtgctgggattacttgcgtgagccactgtgcccagcctgaacattactttttttgcttcataaaatctcctggaaatcgttccatatcagttcagagatcctcttaattatttttttaacagcttcatagtgctccattttttgtgtgtactatagcttattgaaccaatctcctatgaggtactttacaatcacaactcttccgttgaatttgtgtgcatatgcatttttgccttcttgtatcttcagaataaatttctagaagtgggattgctgggttgaaaaagaaatgtatatttagtgttattagaactttgtcattgctttattttgctgtcatttttctcaatttttcaattgagaatttatttccattcttttgtttttatcaatataggtgttagagttatgatttttttctgattactgatctgtgtattgcatagatttgtagtattttcattatcactattttaaagaaagtctgtactttcctttttcatttctcctttcaataaagagatgcttaagagttttaaaatttccatgtgaaaaggctttttgttgttgttttatttttaatttctaattttattgcattgggggctgagagtgttgtacctaatatttctactttatgaaacctactgaggtctttcttgagctctacaaatgattaatttatatgaagaatctatacatttgtttaagaggaaggtgcatcttccattttcagggtatagtttatatagatagatatttatatatacatattgataatgtgaatatattcaaaatatctactttttaattatattgtttgggtcttttacatccttacttttttgtgggggcacttgaatgtactcagagagtggtttgttattttccttttttttttttttttgagatggagttttgctgttgttgcccaagctggagtgcgatggcatgatctcagctcaccacaaactccacctcctaggttccagcaattctcctgcctcagcctcccaagtagctgggattacaggcatgcgccaccacacccagctaattttttgtacttttagtagagatgggacttctctatgttggtcaggctggtctcgaacttctgacctcaggtgatctgcccacctcggcatcccaaagtgctgggattacaggcatgagccaccacacccagccttgttattttcctcttattagtgtgtttctctttctcctttagtttcctgtagtttttttcaaattacaggtgtatagatattcataattgctatattttcattgtggaatgtggcacttaacattacaaaatgtccttctttgtcttatttaatgctttttggcttgaataattttttagtatatgtctcaaatattgcatgggacatatttatataaacattattttttgtttatctgaagttcaaatgtaaatgtgcactgtgtattttatctggcaatcctaaatacagaaaagtcctagaaacaaagactgctgccaggacccacattgtgtgatttaaattacaattcccattaaaatggactaggccaccttggagaaatgatagattccttgaatataagatgagcctgaaacattttatcaaaccaaaaatcaaggaagcaattaaattctcaggcgtcaacttaaagaagcttctgctccagaagagtgcagaaccatctgtaaatcatggccaaattttaccttcctcagtcaactggtcatataaaacttttcatgaggccacaggagttgtgatcatctgggtgacttgtttatgccaaaaactcgtacataatctgtttgagcctgatctggcatacacctcttttatttaatgataggatgctgctgtatatacccaaccttaggcttgatgggtcaaataacattcaattcatggagggaaacttgggtagcatggtaatttgatggtccctgatgaagcactcaatctctactatggcccagtagcaaaccagaagctgcttctcaaaagcagaatagttaatcccaacactttgggaggcaaaggtgggaagatcacttgaggacaggagttcaagaccagcctgggcaatgtagcaagaccccatcactacaaaaatttttttaattagctgggcatggtggtatgcacctgtagtcccagttactcaggaggctgaggtgggagggttgcttgagcccagcaggtcgaggttgcaatgagccaagatcttaccactgcactctaggttgggtaactcttatctgccacagacatttcaagcaccatcagatctgttgctcatgtggcccacatagaaaagtagcttgcatagcagcattacctgtttcagaatcttgttaggttctcagtcttacttaacactggcagtcttgagttacatagtaattggtttagaaaaataatgtccaaatgaggtatatgttgcctccaaagtggcatctctaaatgctctgaattacttaatgcctagaagtttcactgaggtgacagccctctgaatttttacatttggggatatatttccttctctaccacctccacatgccttatcaaggtgactatagtatttgctatttcctgctcatcagggaaaatcagcatgctatcatcaatgataggacaccagcatgatatcctatggaatacagcagcaatcaaagtccttgtggactagattatcacataaaactaaagagtttatattgtcttgtggtgataccctgtgaaggtgtattgccagccttgtcagctgaaataaaatggtgctcgatagcccttaactaatagatataaagaaagaagtattagccagctcaataggtgcatatcaggtgctaggggttatgctgatttactccaacaatgaaatcatatctggaagagcagctgcaactggaatcaccatctaattaaatttatattaatctactataattctctaacatccatttgtcttctacataggctaaatgtaaatgggatggtaaggtaaggtaaatggggtgtgatgagaatctccacccctgcatctttcaagttcttgaaggcaacagtaatctgtgcaattccttcaggaatgcagtattacttttgatttattatttttgtatgttgataaagttctagtggtttctgcttggcctttcctaccagaataatagccttatgtccgagggtcagggaaacactgtagggattctgccagtttggagtatatctattcaaactctgcattctggaactgacgaaataactacagtgtgagtttggaaacccaatgggctcactgggtattgtgtgatcctagctaaaacctggaaataacccaaattttccatcaacaaatgaataaacaaattatggtatatccatacaatggaatactactcagaaaaaaagaacaatagatacacacaaacataggtaaatatcaaaattattgtgccgactgaaagtagctaaacaaaaggaggacatacggtgtggttccatgtgtagaaaaatcaagaaaatgcaaactaacctatagtgacaggaagcagactggtggttgcctaggtattgggaatggagacccaagagagacaaattccagagggtcccgaggaaattctggggtggcttaagtgggtccatgacattcagtgatgtgttggtcatgacagaatggcagaagcagaaactccatggcagtggattgagaaatgatgaataatgaggagtcagtgggtcctatgtaactgtatccagaggcttcctgaggaaggactaaaaaagatacagtgatattggttagcaacatacttcatggaatctcctcctgggtgctgtttgggattccacttagcttaatccaatgagcttgtccccctccgctccttctcctgcactgattctgctcctggagtggaatttacctgcttttcctccttgctaacatctcccaacctttattttccagagcaaaataaaccttttcccctttctcaaaattttctccctttctcaaaccacaccagtccaagctaagctcttccacttcaggactcttataagggcattattacctgtatcacattatatgacatgctcaattaaattctgccaaagttgaaaagtactagtgttaagtgtgtagaaactggcatcagactatctgagtttgattccccctttgtcatgtagtggctgtgtgaccttagtcaagtaacacagtctcactgtgcttcaatttctccagctataagcggatataacagtatctcctgttatgaagattaaaggagttactactgttacagagtttagaacagtgtttgtcacatcctaagccctaagaatagtgataaaaatcaatttctgttcctgctccaggaagtttcacgctcatggttaagagggatacaaagatatatgtggcatttgccctagactcaaggagccagtaatttcgtgctggtcggatttagatttcacagcgattttctatatgccctggcccagaggcctcagtacttgggcaagtttggcacgaaaggccagaaagtccatttataatgaatggccactttttagaacctgtttgcaaggcaaaagaatggtgactgccagaattcaagaggaagaaagggtgaagcctttttggagaacgcagacgatggcctttttgcaaggttttggaagattttcgtttcaacggactaaaaactactgccaatagcctctagacaggcctcgaaaggcaggggaggcccttcagaccccatttccccactgcccgtgaccctaaggtgggcctggccctcaggccccgccccgccccgcccctgcagggtatctggcctcaggccccgccccgccccgccccgcccctgcagggtatctggcctaggccccgcccctccccgcccagcgccccgcccctgcaacgtgtaggcctcggctccaacgaggccccatggctccgtccccgccccatcgccccgcccctcccgggagccctgtcttctgccgtgcgctgagtgtccgcgtcgccctcgccgcagtcgcgggcaccccgctcggcgtcggtgcctgagggaggccgcgatggcggccgaggccctggcggcggaggccgtggcgtcgcgcctggagcggcaggaggaggacatccgctggctgtggtcggaggtcsagcgcctgagggacgagcagctgaackcgccctacagctgccaggcggaggggccgtgcctcacgcgggaggtggcgcagctccgggccgagaactgcgacctgcgccaccgcctrtgcagcctgcggctgtgcctcgccgaggagcggagccgccaggccacgctggagagcgcggagctagaggcggcgcaggaggccggcgcacaggtaaccgggcggtggggacactggagaggacgcgggcggggcgggccgagacggtgcgcaccgaaaggttttcaactgcgggggcaggtgcgggggcgccccgggggagtgccctcccagtgccctgcggctggcccgcccgccctgctcggtggtcccgtgtggcctggggagccgccggatttccagcagtcgccagacttaaccaaatgctgttgatttctcaattcgtccattaaagagcctgccacgcatctttttcagtagcagaaatagtgttttcatttgtttgaaaaaatgctggagtgtttaaaactcattctttccttggtcagaaagactaacagctgcgtatgtaaactctcattccctctggttcttttttgttgttgggttttttttggacgagaagttttcgctttttgtgctcttgttttggtggttcatcttgagaggatagctgtatatttaacatttttatttaatacagtattttatgatttgtagaaaggataaattatcttcttttaacatcatactttctgagtcctgaagcttctcaggctgagatgttctgcagtcctttaggaaggacagctgcggtgaactagcaacatcttcaggaaatagtgcatttgatgtggcgggcagcaaccacacattttccagccacattatttgtttaaagttcaggacaaaaggttttcaagagcacaatatattaaatgtgcttagcaacrgtgtgacaggaaggactgaaccctggagaatgacttgcccactgagagctgtagctggtggtcaggagagcccagctatgagcctctaaacacggggcacttgcagcctgctggcatgactctcttcttaaaatgtgttgctttttcttgccattgatgtgagtcatttataatttatctttcagcctcctcctagtcaaagccaagacaaggacatgaaaaagaagaaaatgaaggaaagcgaggctgacagcgaggtaagttgttgctgtggaaacaatataaaatactacctgtaattttaaatatgtgtatatagttaattacctaggatttccaataaaaattactgattaaattattatttgggtcacattagtgtatttaaaacttttcaagccttaaatatgagatgtcttgagaaatgagctgcccatgtttaataaacacgtgtatttaatctatttaagttgtgctactagagtactagagttggttttttttgtttggttggtttttttttgttttttgaaggcggaggtttgctcttgttgcccaggctagagtgcaatggcatgatctcggttactgcagcctccacctcccaggttcaagcgattctcctgcctcagcctcctgagtagctgggactacaggtgcatgccaccaagcccggctaatttttttttttttttttttttttttttagtagagatggggtttcaccgtgttagccaggaggatctcgatctcctgacctcatgatccgcccaccttggcttcccaaagtgctgggattacaggcgtgagccaccgcccccggtcttttttttttttttgtattcgagaaactagctactttgcttttgtatataaagcattaaaacaatcagtaagtatttatctagcatcaacatttggtaggagtgaagaaggaatacctaggcccaaagaagttagtctggttgaggaattcaggcagactcaggacaaacaactagagaacagagtacgatggtatacaagtaagtgctgtaatgtgtgactctgtacacgttctgtaaacagtagaaaagggaggtgtcatgggggctgggcgtggggctgtctcaaaggaaaaaaaaaaaaaaaagggagatgccagcgggtaaaataggtagaggaggcaggctttgaggtggacctttagagctaaggagaagttagataggcagagaggagccttttggaggtgggaagtacacatgctcttagtcttacagttgggttatgtcccaataaaaccaatgtgagttaaaaatgtatttaatacacgtaagctagtgatcatcgtagtttagcctagcctacattaaaagtgctcagaacacttagattagcttacagttgggcaaaatcctctaacataaagcctattttattatgaagtgttgaatatctcatgtaatttattgaatactgtactgagtgaaaaacacaatggttgtatggatactcaaagtacagtttctactgaatgcatatgactttcacatcactaaagttgaaaaattgcggctggatacggtgactcacgcctgtaatcccagcattttgggaggccaaggcaggtaaatcatttgaggtcaggagttcgagaccagcctggccaacatggcgaaaccccatctctactacaaatacaaaaattagtctggcagggtggtgcgtgcctgtaatcccagctactcgggtggccgaggcaggaaaatcgcttgaacctaggagacagaggctgcagtgagctgatttcgtgcccctgcactccagcctgggcgacaaagcaagactccatctcaaaacaacagcaacaacaacaacaaaccaaaaaacaacaacaacaacaaaatcgtaattcaaaccatggtaagcttgggaccatctgtagaactgagaaggcagtaagggggtgagcctgattcagagctgagcagctggaaaacagtaggctgtatatattaatctcattatgttctaataatttccaggtgaagcatcaaccaattttcataaaagaaagattgaagctttttgaaatactgaagaaagaccatcagctcttacttgccatttatggaaaaaagggggatacaagcaacatcatcacagtaagagtggctgatgggcaaacagtgcaaggggaagtctggaaaacaacgccttaccaagtggctgctgaaattaggtaaaccgcagtgtggaaaagatattcaatcttaagtaattatactgaagcctggtgaaaatgttttcttagggaccgctaatatattactccattctcacgatactaaaaggacatgtctgagactgggttatttataaaggaagaagatttaattgactcacagttccgcagggctggggaggcttcaggaaacttacagtcgtggcagaaggggaagcaagcatgtccttcttcacatggcagcggcaaggagaagtgcagagcaaagtggggggaaaaccccttataaaaccatcagatctcatgagaatgcactcactatcaaagaacagcatggaggtaacagcccctgtgattcagttacctcccactgggtcccttccacaaaacgtggggattatgggaactagagttcaagatgaggtttggatgggcacacagccaaaccatatcagctaattttttttttattcagttgaataaattaaatgtatttaatttttttcctctggcttctccaagggccatgtaaataagtagttgaatatcaraacacaatcatttcctgttctaataaaaatatataggagagaaaaaaatctgtaattcttgataggccattttacactgactttattcgtcaatcaagtaatttccatgagtttttacaggtcttttaagtatagattgaagataaatgttttagagctattatcagtcttggaaaagtgctttgacttttctagaaattagatacattagtgaacttatattgttttgactcatgttaattcttagcattaaatacaattgtatagaagctattgtataaatacaattatatagcttctatacaattgtattaatgccatgtaaataaatgttcatcatttaaaaagcaaactgtttcaacaactgaaattctcagattttctttgaaaactatggctaagattgtatttctgattcatcctattatattgttaaatgctctcccagcctgttttcatgttttccaggaggaatgatgtgctaggagaaaacaggttttgaggcaagaataagtttgttttctcatggagagtcaggttgcatgttaaatgtgttgggtcagtatttctcaaagtgtagtccccagaccagcagcatgggcatcacctggaaacttgttagaaaagcaaatttggggatcccacctcaaaccccctgaattgatcagccatcagtgtttttatgagctctccaggggcttctaatgcaagctaaccgtctagaagtgaccagtcaagcctagtggacatctctggtccatgcagttatttatggacccagcttcctcccatcttgttgatctgctgtctcctaggtagggtttctttgtgtctagcggtggaagctgggtccttgcatgggcctgcctgcagtcaggaggaagagaagctgcagagcaatgatgctttgaggccaagaccccatagtggctggcttcagtttccacttacatcctcttagctcacatttagtcacatggctatgcctagctgtaagagagaattggaatatagctcccttggccgcccagccacatgtccagctaaagcattcataccatggaagagaggaatggtttatggaacaacagagagtctgccacagtctgcccctctgacatccagatatctgtgggtactcttctttcaacatctgacacactcactccccaagtgagacaactcttatgttccatagctcaaagcctgggatttctgagtgatgtacagarcaccccccatcaggctgaccacttgtattctagcaacaaataaactgatagacaagtctgctcacaccacacgtgcatacagtacacagaagacaatcacaaagtgtgtgcttggaaaaaagaaggaggagaaatatagcagggagtggtatagagaagtcatcagattctgcttgaagccaccttgaggccccacagcctggcagcagttagtgcttgtgtcagcccacctgttcatcctttgttctctggaagcagctgtcttatcccatgatcctccatgggccctgattttgcactttgggaagttcggagttgtccattaccctcacttgtcacatctgaagtgcacgagtttgtcctcttgggatctgtgcagtttccacagctcagttctgtggtgcacatttggggcctgagggttcccttaaggatcacatagtcacagatatttgtgagctgagcttatgatttgtttggcaatacaattaccatgatcagttagccatagtaggctctggtctgtttgcagctaatccgttccacatgaaagtaatctcacttaaagaatcttctagatagagacttctcaccctgttgttgcatggcttttttattcggctcactcctgtctccttgtttaatggactgagatcatatgaagcagaggcttgtgggagggaggcactcttgctctctaatccttgcagttccactggcctctattgtctggatttatgtgtggcctttgagaagggctatcaatgcctgtccctcctgcggtttgggaaagaagattgtctttcccatcttgcatagctccacgtttctgaacttttagtcagttgaattacaggacacgggcagagggagcctccctatcccttccacctctgctggcaaactagattgttttcatctgagataactcattcttgtagcttcttgctgaaagcaacaagagttacccagggtataccaacactgtccccccacctccaccccgccccttttctcgatcttggctcaccacaacctccgccctccggtttcaagcgattctcctgcctcagcctcccgagtagttgagattacaggcatgcgccaccacacccagctaattttgtatttttagtaaggatggcgtttctccatgttagtcaggctggtctcgaacttccaacctcaggtggtctgcccacakcagcctcccaaaatgttgggattacagatgtaagccaccacgcccagccctactctccccttttatacctgctttcttgtgtgctacaagcactgtgacacatggtttgcctgcaagttttatcaaatattttgatatactatcacaaaggttattggctctccatatgttagaatctgtttccttgttactcactgccagtctgttaagccagtgccacttgttttggatttttacttccaggtccttatttctgtattacttaagatatatactaagctgctacaacaaagacatcacaaaaaactcaagtcgcttgaatatggtcaaagtctgtttttcatatagcagtctagacgtgggtggccaggttgactgggtgacatgtctccatacggtcttttggggacccagatttctcccatcttgttgctgatttgtctggtacaatgttgccgttgtctacatggtccagaaagaatagcacatgggttcccatctacagaaggtggagagaggttggagaagtgccctccactgttttaatgatgagacacagaagtgttacacatgacttctccttctatccattggctccaaacctggccacatggccacatgtagctgcaaggaaggctggaaaactccttctggagaagaagggcagaatcggtttgcgaaacactagccatctatgacagccagtaaaaatgaaaagaaagttctacttgattaataacatctaacatttattaagttcttgttatcatatgtacacattatgtaatcctgagtatagatgaatgaggaaggtcctataatccctattttgtagataagaaaactgaggcctaaagaagctgagtaaattgtccagtatttaaactcaggttggcctcttacctgtgtgcccccaacctcaatgcagtactgctgctcaagttaatcacagaaatgtaaattaaaagattacattgtaggctgggcacggtggctcacatctgtaatgccagcactttgggaggtgaaggtgggcagatcacttggggtcaggagtttgagaccagcctggccaacagggtgaaaccctgtctctactacaaatacaaaaagtagccrgacatggtggcatgtgcctgtaatcccagctacttgrgaggttgagtcaggagaatcacttgaacccggaaggtagaggttgcagtgagccsacattgcacctttgcactccagcctgggtgacagagtgagaccctgtctcaaaaaaaaaaaaaaaaaaaattacattgtagagttgatacaatttaatagtacctaacattatgagaactcagagacaagatactcttgtaactctgctagtaggaaaattttgcaatatattctgacagaaatcactgaaaatgcatttcccttgacctagcagttgtacttccagaatttttcctgagaaaataattgagtaagatatatgttcaagaatgttcattgcagcattgttttttgttgctactcgtcccccaaagtacccataaaaaataattaaaatgcctagcaaatattggttcctctgtgactattaaatatcacgttttggaaatctgtctcctgttagggaagatgctgtgatttattgtgaagtttaagaagtaggttataaaatcacataattatgatactattaaatattttttattcctatatattaatatggaaagatataaacaaaacatcaatggtaatttcttggtggtagaattataggtgattttgtgtgtgtgtttctgtgctttccaggtttcctttcttaacttgtaattttgtcaacaattttcaaacaataaatgttatttaaaagatacccaaaaaaacagaaagaaagagatcaacacctcactagaagaccatcctggccaatatggtgaaaccccatctctactaaaaatacaaaagttagctgagtgtggtggcctgcgcctgtattcccagctactcgggaggccgaggcaggagaatcgcttgaacccagaaggcaggggttgcggtgagccaagattgcaccactgcactccagcctggcaacaaagtgagactgtctcaaaaaaaaaaagaaaataggcaaaggaagcggatagttcataaaagtaaaaatagcttgtaagcatgaaccaaaactaataattaaatcaaaacaacaattttcaatgtcacattgataaagattttaaaaatcggggtacgtggaagtgatgcgttcaattgacatcagaaatctgtcaacggtacatcccctttgatctagtaattccaattctgtggatgtattcccagaaaacagtcacagaagtcgcaagatgcctgtgtacagatgtctgtgtgatatactctatgatagcaagacttaggcgacctcagtgtgcagcagtggaggcttcattaataaatacaatacttccagactgctttggaaggcaatctgaggcatgacagaaaatgcaagctatacaattatgtcggcagctgcttttaaagacagcacatatgtgtgcgtggggtggatggaggtagaaaaaccactggatagaaatgtaccaaaatgttataagtagtgatttatgatatttatgtgtgatttttattttatcttgtgggctttctcagttttccaagttttttttaaacagtgaatgtggctgggcgcggtggctcacgcctgtaatcccagcactttgggaggccgaggcgggcggatcacgaggtcaggagatsgagaccatcccggctaaaacggtgaaaccccgtctctactaaaaatacaaaaaattagccgggcgtagtggcgggcgcctgtagtcccagctacttgggaggctgaggcaggagaatggcgtgaacccgggaggcggagcttgcagtgagccgagatcccgccactgcactccagcctgggcgacagagcgagactccgtctcaaaaaaaaaaaaaaacagtgaatgtatattacttttctacataaaataaatattgcaaaacaagaaatatctgtcctattagtttatgtttgtactttttatacacttcaaaaaaaaaaaaccctagaaattcttttaatattttaaggaatcattgtaacagtgataaagttaactcccaagtggcttttgtcttcttagtcaggaactggctgaaagcacggtaatagccaaagtcaatggtgaactgtgggacctggaccgcccattggaaggggactcttctctagagctgcttacatttgataatgaggaagctcaagctgtgagtatttaaaaaccagacagccaaactttgggtagttatgttgtaaactacattatataagaggccacatattgaagtcacgaatgttgagttttttgggggtttctaagatttaaaatttgattattgatgtttaataaatatttgtggcatgaatgtatacaaatacatgtcagtttttaaagtagcccatatttataatttcttttttttttttttttttttttttttgagatggagtcttactctgtcacccaractggagtgcagtggcgcaatcacggctcactgcagcctcaacctcccctggctcaggtgatcctcccacctcagcctcccagctacctgggactacaggtgcacaccaccacactcagctaatttttcatattttttgtagagacagggttttgctatgttgcccaggctgttctcaaactcctgggctcgagcagtatgcctccctcagcctcccatagtgctaggattacaggtgtgagccactgtgcccagccttatcatttcttacaataatcatttccttaagttagaatgctttggttattaaatcaatgtgtgtttgaaatgaattgttagtaggccattaaaaatgggtctactttataatttaatatgtataggagaattggaagaaattacaagactcagatatcctttaaatacttaatataattttctataaaataaataccacatttttcacatatgcatgtgatatatgatttctgatatacgttgtcgcctgaacgttgcagtcgcccttcaagctgtccattatcttcatgaaacctaagttatgattagcttaggttacaataattgcaaggcttatgctaaatttctttaaactataagaaccatattataatttctgtttaaaatatgcaaagtataaccattaaatatgtaaacagtacactattaataaaaccatatttaaaagtgattttcagaaagttcagtactgtagactgaattcacaactctccagccatagctagccatgcctcagtttttatgcactactgtctacgtgatatctgcatgtagatattgtacaagaatcttcagtacattcaccatgaaattttcgattttaaccccaaaacttatttcttcctgtttgcctaagtcagtgcattactccaccacatacccaatagctcattccagaaccttggaggttttgtgtgattcctccccgtccctcaactccatctccagtgaggggtaagcccagtagattttacttcctaaaaatatctagaatctgtccacttctctccctctccattgccactgcctgagaatccgcactcaccttgttatagaaccacccaagaaactgcctacttgctgttttgtcccctgaaattcattcccatcgagctatcaaatgatgtgtgtaaatgtaaatttaatcattttgcttaaaaccctttaatgcatcccattgcatttggagtaaaatgcaagctcctccccaaggcctgcatggtctctggcccttccttacctctctaacctttctcaagctatgctttgtcacatcccctacgtgttagtcacacaggccttcccgagtccccatgaatgcaggacactcaccatttttctatattacagagccctgttcatctccttttaaacacccttctcatcttagaattatgcacgtccaggtttgtttattgcctgtgtcttcgccaataggctgtacctgtgtgggggctgtgactatgtctgtttctttcactattgtatacccagcacagtgtttggctcaacaaatgtgtaggtgtggacagtgcaccacatgggagatttgggctgatgctagcagtcagcctgccatcctagcagcatccaaaggagcagtgctgtgccctaaggactgaccctctgggtctgtctgcaaatcatatcccagcctattgctgtgggctgggattgcacatagtgctccatcatctgactccttctgccctgattcattttatcaaacagctttttaattgtaacttgctttctatttaataaaaagaaagaaagtgctgaaagatgagttgattatcttactcctttggtacctatatttatttggtgactttggttaatttcagtttatccataaactaaaatgaattccttgggaactcaaaacagtatcaactttttgaacktggaggactgacaaccgggctctggactgtggctaatgagcccatatatacacttctcaggcgtcccaggcagccagcagacgttccctggcaacacttttttcttcctgagacatctttcaaacttccacagtcacatgctattcaacacacgaagactgctctggagatgcaggatctcgttaactgtagtggtgtcaggaacacttcagtgctctgtgtccagctcagagagggtgcccctggagaaaaagaagacagctagcatctggcactcctcggccttcctcctactctgggcttcaatcaggtttgcacacagctgctctgctggctgttctgagaggtgttcatctctcgtggctgacatgcacagaggaaatggggttgtggccgagctctagctgccactcagcagagcagcttcacactggcactgagcaagtgactccggtggaatgtcagggagggctcagaaagcattctcttctaagtgggcatcgaagattttcctttcaagttgatgttgctgcccttggtcttgccatgtatctccttaaaattttctactggtttacatcattttactactaattttccatgacatacttttggtagctaatggcctctttgtccatgccatgcaggtgtactggcactccagtgctcacattcttggggaggccatggagctttactatggaggccacctgtgctayggtccgcccattgaaaatggattttattatgacatgttcattgaagacaggtaacacactgaatactggcttgtgaatgcatgtgtttcaattgtattgttctgtaatggttacatactagcctagtaactgtatactgttggcccttacataatgtggggttaggggcaccgacgcccatgcagttgaaaatccgagttcaacttgtgattcctcctaaacttaactaatagcctgttgttagctagacgccttaatgaaaacataaacagttgagtatcacatagtttgtatcttaggtgtatcatatactgtattcttgaaataagctagagaaaagagatgttaagaaaatcataaggaagagaaaatgtatttaccattcatttagtggaagtggatcattataaagctcttcatcttcacgttgagtaggctgatgaggaagtggaagggttggtcttgctgtctccgggtggcagaggcagaagaaaatccacatataggtggacccatgcagttctaacctttgttgttcaagggtcaactgtattgcataagatgattatagattggttgaccaattttgaaaattatttttagtttagaaatggtctaaggcatttaactgaaaattatttttagtcaaatctagtttagattcaagagatacttctaagattgttttcttttttgtccccagaagaatatgatatgctatttatctaatcttggacttgctagagcatggtattaattaagaccagaattgaaagcttaattcctagagagaggctagtttaattcgctccgtgataatcaaggacctcattaacctcagccaaacatctcacatagttgagtgccggacagggatgtgtcacagatgcttcacattccataggcctatgcttgaatcgttagcaaacagccagccccgtccacctcctgccctgaattcctcatagctcctagggtacctccaactgccacaaccaaaacctctgatccttctacttcctccctcctcttcaccaccacgccaccatccagttgtttagtccagttctgccaattttatctcctaaatagttctcccacccccctctccttctcttgtttctgccttaagttagccccatggcatctctggcctggatgactatggtgcattttgtctttaccttctcctgcacgctgcttaatgacctccccaaccgagcacccaatgctgtgtagctactacttacagacttgtccaatctgaaccactattactcacaagcatgaaactgtgtttacctacaacaattcttatctcaaaggtgtgggttttttcccaaatcaatggccagtgctccaactctctggacaccaatgaggtgtctaatgattgaactcaattctgacactatctaccctgagttaatgcagattccccaggtcaagggctcagtcccacaagactggccccaattcagatgccagctggaagtctgggccttccatacttttgacctacaggctacaaatcgggagttcccatgaccccatccttgggttcaataatttgctagactggctcacagaactcaagaaggcactttacttaccttaccagtgtattataatggatgttacaaaggatagagatgaacagcctgatgaaagatgcttatggtgaggtatgtgggagggaccacagagatgccatgtgtctctgggcgccatgccccaagcacctggatgtgttcaacaacctggaagctctgtgaatcttgttgtttagggattttaatggaggtttcattatagaggcacaattgattaaatcattgacctttggtgataacccaatctctagcccctctcctttcccctaaggaggcaggtgggggtgctgaaagtcccaaccctttaatcatgccttggtctttgtggtgaccagttcctgctctgaagctacctaggggacctagccaccagtcatctcatcagcacacaaaagacactcgtatcactccagagatttcaggattttaaaaaccctgtgccagaaatctggatgaagaccaaatttgtgtttcttactgtatcacagtatcacatcccgttcatctcttgttaacatggctccagtattcgttcaacaagatgtttttgctgcctgctgtgtgctctgtgctgggtgctggtgattcagcagtgaaggaaccagtctgtcctcatggagctaacagtgtttgggggaagacagcaaatgcacaagcagccatctgctgccgggtggtgatgactataggaacatcagccaggtgtaggaggtgtgtgccatgacaggcaggtgggcaggaaggagcaggtggcattgaagccgaccggagtggagggagggagcaagccctgaggatggggatacttatgacatctgcagggagaaggttccaggcctctgtgggactgtcctggtgtggggatatgtgtggcttgtttgaggagtggcaaggaagctagtgtggcaggagggagtgagcactgaccagggggtgactgaaaggaagttagtccatgcatagcggaggctgagtgctgctgggagcaccgcgactctgcagtccatacagatgtctcccagccttggttccatagccagtgagggcagggacgtgatgagcactgcatctggctcttgagcaaaactaaagcatgtgaagggtaaggaagaccacacaaaagaacaggcctcagaggagctcacagtccacctgggtgtctcctagcagggcttccttctccccttgcagcagaggagaaatgaggcaggtcttggcaactgttgatgcccagtctccctcactgagacacaagagtagtgactgtatgaacgtttgactttctgaagtcctggaacaataagacagcagattcaaatttatggctgctgaggctccaggacaaaggaaagagggaatgcataatgtctggaagatggatgtcrgttctctgctcttctttttagagcagtgtccrgcacagaattgtcagccctggagaatatatgtaaagccatcataaaagaaaagcaaccttttgaaagactagaagtcagcaaggaaatcctcctggaaatgtttaaggtaacttggggaaactcctaaacctcttactaggaatattaaaaatcaatatagactagcttycccaccttcccccaaataattacctgttgctcaccaaattattccaatcctgttaagctactgtgaggttgttaccagttacttgctgtgacatttccctccccatctatttcctgaacatttgaggggagacataggtaggtaaagggccaggtgaataattttcacatgtgtgtttataaatctgattaattctgagtattgtgaatatctgtcacctaaattcaacaatatttataatcccatataaaatgctgcctttttctcttttctgtgggagttttctgttaacttttgtttcagattttaacctagagtaacctgtgtaaaacagtaactttctctttatatttttttgaccaacgtacttaaatatattcctgattttatgttttaaaacatacatattggagaaaacatacattttgttttttattttttgggttttttttttttttttttttttttttcagacagagtctctctttgcctcccaggctagagtgcagtggcactatcttggctcactactatcttggctcactgcaacctccgcctcctggattcaagcaattctcgtgtctcagtccctcagctgggactacaggcatgtgccaccgtgcctgactaatttttctatccttttagtagagacaaagttttgccatgttggccaggctggtcttgaattcctgacctcaagtgatctacccccctcagcctcctaaagtgctgggattacaggcgtgagccaccacgcccaaccaaaaacatgtactttgaaaacacagtattatcagttttgtgggcttgaataaaaaaatagagttggttttggtaaaaaattgcagtattcttttttgtgcagtaaaatatataacatataaaatttaccatttaatcctaagtatacagttctgtggcattaagtacattgacaatgttgtcaaaccatcaccaatctccaaagctttttatcttgccagtcagaaactctatacccattaaacattagctccccattcccgccctgcccccagcccctggccaccaccattctactctctgtctctgaatttggttcctccaggcacttcatatcagtggaatcatgacaatatttatccttttgtgactggcttgtttcactcagcaaaaagtcctcaagattcatccatattttaatattttaatgtgtgtcagaatgtccttcctttataaggttggataatattccattgtacggatagaccacattttgttgatccattcatccacctgtaaacacttgggttgcttctgccttttggctactattgtgaacagcgctgctgtgaacatgggtgtgtaaagttctgtttgagtctctgctttacttcttttgggaatatacttagaaggggaatttctggatcctatggcaattctgtttttaagttttcgagaactcgccataccgtttggtgcagtggctacaccattttacagtcccaccagtgatgcacagggggttcagtttttccacatccttgccaacacttgttttgttttttttttaatcatggacatcctaatggttgtgaagtggtatctcattggggttttgttttgacttgcatttctctaatgacgtactaatggtgagcatcttaatgtgcttattggccatttgtgtattttcttgaagaaatgtctttggagaaatgtctgttgagctcttttgcccattttttaattaggtttttttgtatttgagttataagagttcttgatatattctggatatccatttcttaacagatatgtgatttgcaaatatttaattctgtgggttgccttttttgcagctacttttaagaactaaacacaattaatctttgttaaggaaaatgatttgttgtgaatatatagataygaaacagttaaatcatgcagatacgggtttttctcccaacaactagcttctttaagtagttatttaatataaagtgccttgtataccccgatagtagtgatggaagcagaaaagaaaggaaaaggaaaaaaacccttagttttataaatatatcatcattaygataaactttgcttttgtttttatacaaattaataatatagctgtgtccttgtcagaattttattgattaatgttaaaattagatcttctagaacagtactgtccaatagaaacataatggaatccactagtctgagctacatgtgtaacctataattttatggcagctacattttaaaagtaaaagttgcaattaattttaacaaatttttaacccaatatataaaaagtataatttcaatggtagccagtataaagaatgattaacgaatgattttcttcttctttttgcaacattatacttccaaagtccagtgtgttttatactcactgcacatcttctttcaaattagtggcatttgaggccaggtgtggtggctcacacctgtaatcccagtactttgggaggccaaggcaggcggatcactagaggtcaggagtttgagaccagcctggccaacatagtgaaaccctgtctctactaaaaatacaaaaattagcacatagtaaaaatacaaaaatacaatacaggcatggtggtacatgcctgtaattccagctacacgggaggctgaggcagaatcgcttgaaccagggagacggacgttgcagtgagccaagatggtggcactgcaccctagcctgggtgagggagtgagactctgtctcaaaaacaacaacaacaaccacaaattaatggcatttgaaatgcccagtagccacgtggcttgtggcctccatgctgcacggtgtcgctcaaggctgtgagctctttgtatccctcgtgtctcagcacctagaacatcagtagatgacctttcaatgtttcttgaagaaaagtagagttgttttcttcatttcaacattgtgtgtaataatgtgtaaatatgtttttcttcgtagtacaataaatttaaatgccgcattctgaatgagaaagttaacactgcaactaccaccgtgtacaggtttgtgtccacasatggtaaacgctgctcagtggtaaacttgaaggtgttagcagtagaggccgagtttgttttctggttggagatcgatttttcaagttgtgtagttgataatctaccgtagttacaatcttcaaaatgttttcactaaagagaaatgattattttcccctttttagtaatcaggacagtactgagacccatattttgtttcctgggtgttagctataacaggatttttctccatgtgagtgatactgttgggaaaggagtttctattctgtccttccacgttcttattaatgtggcagtgggggccattacaagccatctcctcggcagtgattctctgcctcatacttactgtccagagtgcaagtgtagaagagtctgccccattgtccagagtccaagtgtacagtcttcatgcattagcaggatactcatgatgagaccaaaagaaaatactgggaaacaaaggcaggatcaaatgtaagaggagacaagtgaagttaataccagaatcacttagctctgttcatttaacctcaggttcctgagcacctttttctttattcgtgtgtatacgccttatatgtcattgctgttcccctttccgtgtgttccggccatctgggtgctgctaggactatcacagtaccgccttagaagacctggtatttatttaattataaccacagatattctccctcatggtacttactttcgacagtcaaggacttatggttctctggtttaattgtactgtaagtaaaatcatatcccctttgtgcaaagctatgcacggtgcatttcttaaagcttaaaaataaatgaaaatgtagaaaacaggccaagttttaaatttctggcttctaatgcttgagctcttgggtttgagaaccttacttacgtcaacattgacactttttgtagtttttcaatttgaatggcttgtatttaatttttgaaaaaaaaataaagcttttcttttatggctttctttttttttttttttttaattttttgagatggagtcttgcactgttgcccgggctggagtgcgatggcgcgacctcggttcaccgcaacctctgcctcccaggttcaagtgattctcctgcctcagcctcccaagtagctgggattacaggcgcccaccaccacgcccagctaattttttatattttttattagagacagggtttcactatgttggcgaggctggtctcgaatgcctgacctcgtgatccacccgcctcggcctcccaaagtgctgggattacaggcgtgagccaccacacccggccctgtgactttctatttaaagattagagtattgaagcctttcatgctaatttggcattccttcccttcatctgagtgttgtttacaagctctctccctagagaacaatacacaaagactgaccattgagagagatgacattttcgtgtttgccactctgtaagccagtccctttttgtattcattgtaatttttaagtttttaatcagagaattgcctagtttctttcagaagatgttctgtggtttttgaatctagagggcagagtggactctgaggctagatgaatcacctctctccttcaccctaaattaaaaatggcattgctacatataaataagtgaagctctacctaaaacataggatattatggcttataatgaatagtccagaacactgtaactgtgcctgagcatgtcctaaatatttcattataggtgcggtccattaattgacctttgcaaaggtccacatgtaagacacactggaaaaattaaaaccatcaaaatttttaaggtaaggattgatttttttttaatacagtaaacttaaggtgcactagctattaaaggattttaatcatatcttattcaatcatatcttttgtagtctgaacatcatgatattttaaaatatttcattcttatttgatgaaaactaataaaatcatttagaattttgataattagaacactataggtggcttttgtttatcattttaccttattgtaagtgttataacatttctttttcatacgatattttattttattttttatttttctgagacagagtcttgctctgttgtccaggctggagtgcagtggtgtgatcttggctcactgcaatctccgcctcctgggttcaagcgattctcctgccccagtctcctgaggagctgtgattacaggcctgcaccaccccacccggctaatttttctatttttagtcgagatggggttttaccacattggtcaggctggtctcgaactcctaacctcaggtgatctgcctgcctcagcctcccgaagtgctgggattataggcatgagccactgcgcctggcctttttcatacactattttaaaatattgttctatatactatggttttcttgaatagccctgatgtaagcaagaatatttgtctgcatgtgaaagtaatgtattgcggcataaagaaaacagcaggaggggatatgatgttgtaatggagaaaacatcactctgggattaggaggcatgggactgacttggcagtcccagcctttcttggctttgattttcttacaggtaaaatggggctggctaatggcactgttcttaatcattgactgtaggtcagcaagaccgacctttacttccccatacctactgtctgttctgccccatccttggtgattatgattgctgcttagccttccctcctttctgtgtgctctcactgtcattcctagaatccatagcagactctacataatttgctggttaatggtataatttaggctgggaaggtttagttagaatccattttaagattgttcccagcactacaaatagtcttctttaagctttgttgattttgtttgtttgtttgtttgattttgagacaaggtcttgcattgtcacccaggttggagtgcagtggcacaaacactgctcactgcagcctcgwcctcctgggctcaaacagtcctcctgccccagtctcccaagtagctgggattacaggcatgtgccatcgtgcctggctagtttttgtattttctgtacagatggggttttgccacgttgtccaggcgagtctcaaactcctgagctcaaatgatctaaccaccttggcctcccaaagtgctgggattataggcatgagccaccatgcagggctgctttgttgatatgatagtggaaaattgcatttgtatttaagagcagttttacttacaactgaatgtatgatatatttaccaaaatcctctttgatatttagaattcctcaacatattgggagggcaatccggaaatggaaacattgcagaggatctatggaatatcctttcctgataacaagatgatgagagactgggaaaagttccaagaggaagcaaagaaccgagatcacaggaagatcgggaaggtatgccccacatcttaatcactggagatgtaatcrtaagccarcataggaatgtttctgtctcacaaaactaagttgctttaaaaataagatttcttcttcttctctcctattttgctggcactcacagtccgctgctcagtgctttcattttaataccccagatgtcttctaacctctttccttcctgtatcttttattaatttttgaaaattgtacccttctcttatttttgtcatgataaaaaataaagttgtttttggtgaaaccccacctctactaaaaatacaaaaaaattagccaggcgtggcagcacgcgcttgtagtcccagctactctggaagctgaggcaggagaatcacttgggcccggcaggcggaggttgcagtgagctgagatcgctccactgcactccagcctgggcgacagagtgagactcagtctcaaaaaaaaaaagagttgttttttacattctgtgcactttatagcatcctttgtatctgggagacagagcagcgtgtagaaggaaaagctcagactggaaagcagctcggcctgagctttatgcccagtccttgtactcactagttgtgttagatgatgggcaagctccgtgtccttgtcttccttgctgggtagccttgcagggtggctgtgaagacagaaactgggtgacggtgcctggtacaggataggctctcagtaggcggcagccatgatgatcatcatcacctaaagcccacctcctgcaatgaacttttttggtctttctaccgtgttgtctccccatgagtgccgtactccaagtgtgccaagtaagaaaattcgcagagaatagcagaaggtgaagtaaaagctaagttcaaagctaattaggcataaatatgattggaaattttacatatgctgttgcatgcatttaggtataagtgttgaatggccttggaatgtctattactagagaagatggaaataactgagtattatatgtgtgtgcagtaaatattaagcaatagcagatgacatttgaaatgcaatttttgtttcaatctaggaacaagaacttttctttttccacgatttgagtcctggaagctgttttttccttcccagaggagccttcatttataatacgcttacagatttcatacgagtaagttaactttaaaatgttttattcttattcaattccagtttacatttttactattttctctcataataaagtggtcaagcgtttccattaactttactttggtaacattaataagaattttgaggttaaaagtgagatactggccagacacggtggctcacacctataatcccagcactttgggaggccaaggtgggcagatcacctgaggtcaggagttcgagaccagcctggccaacatggtgaaaccctgtctctactaaaaatacaaaaattagccgagtgtggtggtgcacacctgtaatcccagctacttgggaggctggcaggagaattgcttgaacccgggaggcagagtttgcagtgagccaggattgtgccactgcgctccagcctggtgacagagcaagactccatctcaaagaaaaaaaaaaaaaaagtgaggtactagattgtaccttctaataataacatggagataatttctgtttcccctgaatacattcctggatttcataaaattcactttttgtccatataagtttctaaaccatgtagaatataaaggtaagcattagactaagtgtggcactccctgtgaaaaagaagaaaggagaaagtgtcgtctctggtacagagtgttaagccatgaagcattgcttctccaaatgtgctccatgggccactgatgcttccctttgcctatagcatgactcccaggtgatttggcagttccagaggaaagaggaaaaaaccaacagtgcaaaatacctacttgtattacaagttcataggtgggaaagtctttagtatttacatgataaggactgtgtagatagtgttcacaggtgatccgggtggactactgggattacatttccatgcttgcactgttttgtctttcctataatcattacctaaatttttcatttacttagtttttttatgtgcctaccactaattcatgctccaatttctctcaaaaactacaaatctccttgcaacatattctgcaatgattcaggtaattgctcagtaattttttttttcaaatttggtcctactccagaattaacttgctactaagattcttgcaaactgatggcttaggacttcttttcatcatcatcttggccactcccctcatgtctcttcctatgctgagtctcttttcctggkccctgtatatctcttcgttgcttatctttaattctcatttggggatcactttcttcagtaactttctgagaagacaatccatggcatgtggcctgcactggttattctctgtttgcttctccagtcttgttctccgtctttttcttcttgtgctgtgcccctggaggctgacatgtctgtattctatcacctggggtacacatcttccagtagggactggccaatgcgaggcaatggtaggagatcagagggcagtggaagagacttgaagaatcactgaagattatcagagatttacatttaggcaggtggtgatgaccatcacagctgctgatttggatgtgctgtcttctctggaaaatcagcatggcccctggcaccttgtactctcaagttgggagtacaatagatggagaatgaacagaaagcctttacagtggcattaaggggatctcttattttttatagatgcaagacagatgtggctgatgaacaggagcagggcctgattgtgagggtcaccaaactgtaaaggcacttaaatgcacaaacccagtgatctcttattctaaggtaagggcactggttgggaagggtccctgaggcttggaatgggaatatttgacagacacaggcgacactgagaactttgcatttctggatacctttgtctgaaggaattggccttaccatgaaaaaaaccttttggagaactcagctgttttttctgttggttttttgttattatggttgtgtcacttcccatatcaagtaatattttgttagatgccaagtattacatgtaatttaggtgtagaggctctagatgatatctcccactggagcattcaccctctgccactattaaggactgatcattgaattcgatcagagattgcactgggttagggccggcttccactttaataagattcaacttttgattcctgtttctaggtcatgacccccttgggtttccacttgacaggctggtgggtttatgtcttttcagccccaaaggactgtagggaagtccattctactcttccaaagtgttctattcttaacaaataattccaaggctcwtctaattactacattggctcaaaaatccaggacatcttctgaatcaggcctagctgcagatgaggctcctcgggtgcagtttgttgggaacagattatcaagtacatttcctctacagtttaagacctgtgaactaaaaactcaagttatctatcagccacctcatcctctcatctccctcacattgtaaaatggtgcttgaggaataatgcaatagatagtcttactcaaaaaggagtggggtagagtaggaggcacatggtagtcaccatctgtagaaattctggtatctaccggtcatcactgccccagggtcaaaagatacactttgattaagatccagttttgctctgcctggctgtgattctgccctctgagtcatcctttctcttccataagaaatggcccatatgtgccttagggtagctttcttttttaaaaaaaaaaaaattatttatgtatttttttattttttatttttctttgagrcagagtctcgctgtgtcgcccaggttggagtgcagtggcgtgatctcagctcactgcaacctcctgcctcccaggctcacgccattctcctgcctcagcctcccgagcagctgggaccacaggcgcctgccaccatgccaggctttttgtatttttagtagagacagggtctccctgtgttagccaggatggtctagatctcctgacttcgtgatccgcctgcctcagcctcccaaagtgctgggattacaggcgtgagtcaccgcgcccrgcctggggtagctttgttctcaacctgattccttcctgtagaaggctgggggaatccaaagcccttatttcattttgtgctgcctttcaatctaagctagtacaattcctttaaaaactttgcgagtccttttctataaatttatcatcaacacggttagataaaagccacatccacatctttctgacaccgatccttctttgcctgggaggctactgtgagacaatagtacactgcagagtcttcagagccttcgtgtttaatggaaagggtctacaaagcacactcctaagactttcagaagccttactaggtgcacttacagtagatcattctgaggttttcacagtgtcttacagccccgcccttaagatctttaccgtaaggctgtgctttgatgattataatctgaatttgatccgtgtcctgaagcctcgtgagtcttttttggtacagtctaaggataagaaggtttcatttttgaacccagcaggtcctggtggctttatatttcctctaaacttggctcaaaaagttaattagtttcacgtttggtttatacctcttttcttgtattttaccatagggagccaaaaatcggctgtcattttctacattctgcctggacgtctccccagctaagtccatgagttctttgggtaccctttctgttttccatgttacttctggtgacagtgttacccaccatctgtttctggcacctcgtaataagaatcccttctagcttctgcccaccacctggccccaaagctacatgttttaggttattgttatgtcaactgaagaatcatgaggttcataaaattgtaaaggagagcttcatttcttctgaggggttgcagcctgaaatcttgcaggctaggaagcttcatagcttctggcagaaaccagaagcaggcatttcaagggagggaaaagtaagacaggaatttatgctgatgagattggccaagtataaatatttaacaggttataagaagagctatgaatattcacaaaggggggacatttatatacatagtaagcaaacatgcatgttacatgcatcccttgttcactttggggtggagacaatgcatttaaattaggctgtataaccaaaaggtcaaatggaggacacggaggcatcccatgtgcagcctttataaaccaaccagaaccagtgcatggtgagtggtcttttaacaggaagaaatgctgctcagttgtgtaaatcagtggtggaacaagtctttcaaaagggcttgtttctgattaactcttaggaaagaaagcctaatggttgttagtgacagagtgggtataattaggcatgtccaacctcttgtcactgccagtaactcagtttttaaggtttctctggggtcctttggccaagagggtgtctgttcagtcagttggggagcttaggattttatttttatttctcagttatagcagtacctacatccagtgcaaaattctgttctggatggctattgcaacatagcaaagtatcccagaacttaatagtttaaaactgccatttcatcattactgtctttcatagttccaaattttaggctyctctgggtggttctcgcattgggtcccttacatgactgtattcaggtagagtctcatgccagggttattgattgaagaatgtccccttcccatcatagaaagactaaaaacatcaggcattggcaagaatatgaagcaagtataacacttactgctggtaggaacgtaaaatggtagaactactttgtagcagtttggcatttcctgtaaagataaacgtgccccacttcttttttttttttttttttttgagacaaagtctcgctctgttgcccaggctggagtgccgtgacgcgatctcagctcactgcaagctccgcctcctggactcatgcattctcctgcctcagcctcccaagtagctgggactacaggcgcctgccaccaccatgcctggctaatttttttgtatttttagcagagaccgtgttagccaggatggtctcaatctcctgacctcgtgatccacccacctcggcctcccaaagtgctgggattataggcatgagccaccaccgcgcccggccttttatttttttattttatttttttcctaagatggagttttgcccttgttgcccaggctggagtgcaatggcatgatctcagctcaccacaacctctgcctcccaggttcaagtgattctcctgcctcagcctcccaagtagctgggattataggcatgcaccaccacacccagctaatatttttgtatttttagtacagatggggtttctccatgttggtcaggctggtctcaaactcccaacctcaggtgatttgcccgcctcagcctcccaaagtgttggaattacagacgtgagccaccacgccagcccccacttctaattatcccaagataaataaaaacatatgcccgcatctacactgagacttgtatttggatgttcatagaagcgttacttataatagcacagaaccagaaacaaccccagattcagcttgtgaaaagataaacataatgtggaaagtccatgctgtggaatacaactcagcatttacaagcagtgagatactgatatacacatgaaggaggaacctcgaaagcatcgtactaagccagataagacagagaatgcataaggcaccattccattatatgacatttcagaaatgccaaaactatagtgacagaaagatgatcaggagtccagtgggtggggagaggggattgactccarggggtcaggagggaacttcctggagggtggaaatgttctatatcttgactgtggcagaagtcgcatgactgtatacatttgtcaacagtcactgaattgtacacttaaaattggtgaattttatggcgtgtaaattttacctcaagccattttgtggtaaaatacacataatataaaaatttaccattttaactatttttaagtatgcaattcattctcactaagtacattcatgttattatgcaactgtcatggtccatctccagaactctttccacgttgcaaatccgaaactctccaggactttgtcatcatcctacacttaatctctgtacccactaaacactaatttccatgcctgcctcccccagcctctggtaaccaccactctagtttctgtcgctatgaaattgactatttctaggtgtcacatataaatgggttcataggctatttgaccttttgtaataaaactatctttttaaaagtctcctttggtgttgacataggcaagctagctttcttacattagtgtttgcatgatatatcttttcctatccttttattttctgcctctgtttctatatttaaagtacgttgctggagaaaagaatactgttgggtcttgatatttttcagtctatctgcctgtgtcttttttcctctctgccctcttccatgtgcctcaaggtcctccctgaggttccagttggttctgttagtcaccagccagtagagggtgtgcttgtgggacagactctcagtcacagctgggctgcctcaggggccatggtctggtccaatatcagtagcctttgccttggtgctgagtcctagaccagtcagtagtagccagagtgctggggatacatggtgctgagcacgatggaatatatggccgcattctaccaggaagcatccttttcctcagaactggaactgctgcatttctgtggaagggatgtaggaggccaggatgggctgggtgtgcacactgctcccactgagggaaatttcaggatttctgagtttttgactcaggtaaaatgacttccacttaggtttaagtaaaggcaagtgaacttttgtttgtatattagttactgactgtgtggacaactgatagtgaataaatagatctttttgttagtctccttgaatttttttttccctgcattctggaaaatatctgtcagctgattctgtacttttcttacctttttttaaattaacttttttaattgtcatgcagtaaaatgtacgcctttttgataacatgcagaactgtgttatcacctcagcaatcaagatacaraacagttccgtcacccctcaaaactccctcatgctacccttttaaaatcaaatcctccccagccctgacctcagggaacggctgattttttctctacccctaaaatattggcatataaatggaatcatacttttataaaacctttagagactgaccgctttcacccagcataacaccctggagatgcatccgagttgagtgtccccagcgggcctctgcttttgtccctgggcagtattccatcatatgaacataccactgcttcagatccatcctgcagttgaggggcatttgggttgttttcagcttttggcagttatgaaaactgctattgtcattcatrtacagttttttgtatgaacataggttttcattttactagagtaaatacctaggagtrtgatttcagggtcatatggtgatatggtttggctgtgtccacacccaaatctcaccttgaattgtagtaatccccaagggtcaggggtggggccaggcggagataattgaatcgtgggggtggtttcccccatactgttcttgtggtggtgaataagtctcttgagatctgatgattttataaaagggagttcccccgcacaaagtcccttgcctgctgccatttaagatgtgcctttgcttctcctttgccttccaccgtgattgtgaggcccccccaccagccatgctgaactgtgagtccattaaacctctttccttcataaattacccagtcttgggtttgtctttattagcagtgtgagaatagatatggtaaatttaagtttataagaaaatgccaaactattttccaaaatgactactgttttgcattcccaccagctgtgcatgagggttgcttttgtaaagctcatctcagtcacaycttttgcatttcctggaatctgcctgacttgttgatgcatgtcttgaaaccctggagtggggaggggagtggcttctcttgttgttatattaataacccacttggggaatttttgcttcctcttcacacaaccttagatggagtgaatttctagaccaagcttgtctttgtgaacatggcaggcctcaaaacattcagctcttctgcagggagagtcctgaaagatgcactccaagggtttaactgaagagagtctagtgaaggaagtatttatggagatatgggcctggctaaggtaactaacaagggatgatagagcgcccagggattaccaatagcaagaatcccttcccctccatcactaggcctgcagaagtgaggagatggagtagtaatactagaacccacagagagcttggagccatggaggagagaagtgaggagatggagtagtaataccagaacccacagagagcttggagccatggaggagagaagtgaggagatggagtagtaatacyagaacccacagagagcttggagccrtggaggagagaagtgaggagatggagtagtaataccagaacccacagagagcttggagccgtggaggagagaagtgaggagatggagtagtaataccagaacccacagagagcttggagccgtggaggagagaagtgaggagatggagtagtaataccagaacccacagagagcttggagccgtggaggagaggccacacaacagaagctgtaactgtggaacacagccagaacctgagtaaacccacagcagggagaaccagggaaagaaatatccagacctctctcttccactaccctgtgaatcctttggaacttcccattggtcagacccaatcagaaaccatatggaaagtatattggcatgtcaggattctccacagaaacagaaccaacaagatacatagaaaagaagagatttattatgaggaattggcttgtgtgattatggaggccaagaaatcccatgatctgagggtccaagaaagttggagatgtaattctcgcctgagtgcagaggcctgagaaccaggggagctgatgaatctaaaaaaaggagagagctcaggtacatacacagagaattaaacagtgcttaccatggtcaggggttggggggaagaaatggggggatatagatcaaaggayacaaartagatatctaggatcaacaaggycagagatctaatacagaacatgaggactaaagttaacaaaattatatttatcagggagttttgttaagtaattagattttaactgctcttgtcacacacacaaaaaaggtaactcttttactatttgtgtcctataacatcatgttgtgaatctcaaatatgtgaaataaaatttattgaagaaaatttaaaaggctgggcatagtgactcactcttgtaatcccagcactttgggaggctgagaggggtggatcgcttgaagccaggagttcgagaccagcctggccaacatggtgaaaccctgtgtctactaaaaatacaaaaattagccaggcgtagtggtgcacatttgtgatctcagctacttgggaggctgaggcaggagaattgcttgaacccaggaggtagaggctgcagtgagccaagattgtgccactgcactccagcctgggcaagagagcaacactctgtttcaaaaatatatatatatatatataaatmctgaggtaatagttctaagactgatacccattggccgggcgcagtggctcatgcctgtaatcccagcactttgggaggctgaggcgggtggatcatgaggtcaggagatcaagaccatcctggctaatacggtgaaaccccatctctactaaaaatgcaaaaaaattagccaggcgtggtggtgggcgcctgtagtcccagctactcgggaggctgaggcaggagaatggtgtgaacccaggagacgaagcttgcagtgagctgagatcacgccacttcactccagcctgtgtgacagagcgagactccatttcaaaaaaaaagattgatacccattaaataattttcattgctgaaggaaatgtgaggaaacagttatcatatacttagagagaaagtttaaattgctactaatctggtaacaaatattaatgtgaaaaaaatgcacactcctagcaatattcttagaaaggaatctaaaatatacaattaaaatcacatagaaaaaaactttactgcagaatagtttgtagtattcaaaaatgaaaagtctaatgtttctcaatagtagaaggattaaatactttgtgacatgtccacacaataaagcactatgcagttagtacaaaaatacatctatgcatactaacttgaagggggttcagtatacctcaccattgaaaactggaagtgacagagtaaatgtatagtgtatcctttctttttataggtaaaagcaaaaaacaacaaaatcctgtatgtgtgttttgtgtttgcacagtcatggaggagagggttgaaatacaggaacagcaggccattagcattatctcagggcagtaaagggtggaatgagagaaaatgttcaggttttctttatacaccttatttttttccacatgaaacataatttaagcatgttgtattatactattgtgtttaaaagtatatattttataaaataaaaaaataataatcacagcaagtaagccttgtgcggagcccacagaagtcagctttggggaacacagtgcagggcagagaaggaaggaaaatgggccaagatgaggcgagacaggcagtggcaaatggaaaataaccagcctggctcaccccctgtgcctctcagcacattcttgccttttgcttggaggacactgaggacattggtttcctcccacaaactccgatcagccgatgtgtcatcatgtggtgatgtcatttcagtttcacctaaatctgaatcgtgccattggccaccatgagtgcccttcatgtaagaatgcaaggaaaagtcataactaaatgtaactgtttcagcctctgtagatggacgctagggccaagctgatacatcagagccttcttttcccatcactcattccacattcgccttatcctggtggcaccccagatgggcattgttttatttggtgggtgcattagtttcctagggtattataacaaaataccataaactaggtgacttaaaacaacagaaatttattatctcccagttttggaggccagaagtgtgaaatcaaggtgttgacgaggctgtgttccctctaaaacccatgggggaatccttccttgccttctcctagctactgttggttgccagtcatctttagtgttccttggcttgttgaagcgtcattcccatcctctgtcttcacgtgatgttctccctgcgtgtcttcacattgtcttccccttgtgtgcatctgtctctgtgtccagatttctcctttttataaagagaccagccrtatagtattaggatctaccctaatgatctcattttaatttgattacctctataaagaccctacttccaaataaggacacattctgaagtactaggagttaggacttcaaaatatcttatttggagaatacagttaaaccaataatagtggatggcctcagtctgtccttaggatccaaggttttagtaatgctctttgtggggtttcagggctcccactgatggttgttgctagatgtgttgatatcaaaggctccccactgaattccagacacagtcctccttactccattgtaagcaatacgacttctcccagtaattgcgatcaagggtagtaagtctttccccaagtaattgggatcaagggtagtaagtccttttctgtctatcagttctatagtaaagggagcccataatgggcaatggacaatctcaactcccaagcatgtctcagtttttggtgaaaacatactttgggcaccaaaacatgttatcgaaagattccaaagctccaaggataaagaaaatatcctgaatgtttccagagagaaaaaagccacagacataggactgggtatctgaatggcattgaaattttcagtggaaacactgaaaaacagaagacaggaacaatgccttagtaatgcgaagcctagaaatctatacccagttaaagtagcttgcttctgggtttctcccactgccaatttagttttggctttcctaggtcttctgaggcaattaacacttgatcacctactttgcagattctaacttattatagcattcatcttctctcctattttctttgtcctggtagatttatgctcttataaaaactttctttactcttattttaatggggttttggaaaggagctgtttatgtggaattgccttattttttacaatgagaaattacttgaaaacaaatttatgacactgattcttagaagctatttagatgtttttaagtggccagatcactaggtatgggtagagactcagctccttcaataacctaaactgktatttccaggatgaaatatgatttttaatgttccagataagttatctggatttcttcaggagactggactgagctgtgaactgctcagtcactgagagtttactctttcccagcattagagaaagaaattaatggcatggcatgagacatattttactccccaactttttctcttgaaaagttcaaatctagagaaaaactaaaatgcaatgcaatgaacatccatatttccttcatttggattcattagttggtaatattttgccagtttgctttatctctctgttatttatatgtgtgtgtgagagacaaaacaatatgtatattacaatatggagagatacagcagcataatatatatagatatctcctatatatttatgtaaaaatataatagttgctgacacttcatctcatagggattatattcattagtttgtgctgctataacaaagtaccctagactgggtagcttataaacaacataagggtatttctcacagttctagaggcagtaagtctaagattagggtcccagcatggttgggttctggtgagggccctcttccaggttgcagactgctgacttcttgtaacctcagatggcagaaagaggaccagagagctctctgcgaatccttttataaggacactaatctcattcatgagggctctacccttatgacctaatcacttgtcagaggccctacttcctaataccatcaccttggggttaaggtatcaatatcacaattttgggggagacacattcagtccattgcagggatagtttaaaatcatttctaaacatctcaagaagacatacattcctaacatggttgcattcagagtgaattaaaaatgcattgagcagtatctcctgagctagactttaaaagtagtttttagtaaaagcgaacacgcacaccctgccacacacacacccacacactcacccttaatttctgggaccttgtttaatctgaatatatggaaccatctgaaatagccaataatcactgccattcttaatgacatcattttgttaaacattttctttctttttttgagatggagtctagctttgttgcccaggctggagtgcaatggcgtgaccttggctcactgcaacctctgcctcctgggttcaagcgattctcctgcttcagcctcctgagtagctgggattacaggtgtgtgccaccacgcctggctaatttttgtatttttagtggagatggggtttcatcatgttagccaggctggtctcaaactcctgacctcaggtgatgcacttaccttggcctcccaaagtgctgggattacaggcgtgagccaccacaccctacctgttaaggttttctaatttagtaaaaacaaaggataggtaaagcagctcactgaatggccgagacctaagctgtctaccgtggactgccaggatgccctgctgaagaataacagacaacattcctttcagttgtataaaaccattgttagtaatcttaaaatgttatgttttatgtttttttagctgtgaaaacagtttttcaaatgtgctcaaagtatacatggcattctagatttgggccagatgtccattaagtggtttacaaatgttgagaatctaaggattctcagaattcttacttattcagctttttgtgttcatccaaattaaaactgtcatgcaaagggtccctatcaaattactgtcaaaacaatttgacctaattgacatttgtaaaacaacagcagaatatgcatttttggaaagtgcacataaaatatttacccaacaaagatcacctaattgttttgtttttaaagaaagtttaaataaagttaaaactttgcttggaaaaaaactctcttctcctgtctccagtaattcaattagggaagctgttaataggtagggagggagagaggccagctcatgacttaataatttcaactacttaaatcgttatacactaaaattcttatttctgtttaaaactaaataaatcaaaattataacatgcaacatggcattcaggcttattaaattataaattttttctgcctcttaataggaaaaaacctgtttagaaggactttggagtagttacagtgagtttctatatatattgtatttcaattactacttttcaaagaactaaaacattatatactatatactgttatatgctataaaataaatatactcaatagaaattatactaagcatatgtaaatctttcttccaagatccagaaaccaccacacctaaaactgagggtacattaatcatgaattaatataggacatgagcccaatttgaaaatatttgctcatrgtgttactttgcatggaattgtgatctgccctagcagattttaatgttgaatgcatgtatcttgaaggaggaatatcacaaacgggacttcacggaggtgctctctcccaatatgtacaacagtaaactctgggaagcctcaggccactggcagcattacagcgagaacatgtttacctttgagattgaaaaggacacttttgccctcaaacccatgaattgtccagggcactggtgagtattaaaagcgaagcagaccttttcatgagagcacatagcacgcttcgtcacaattatcttttaatgctttgtggaatgaaagagtccctttaatctgaagagtggtgattactaatttttactaagttgtttcattccggagaatggatttacttttgaaaatatatttgatctttggcaggtatgggatgttagctggtaaccattgcatttttttgtgctgattaaaggataatgttatgtgtcaattttataagttttataatatttgtctttcttatagtaatgcacttcacatgttcatatttgcagaatatttagttctttcatactgtttgggtggattataacaagatcaatgaggtcataatcaatgggtttctggatttcactgattccaagataccatttttcttccacatttcaacatttctgaagttgaaatgcatcttatagttggtggcatcttagtattatatcataatttaattaataggttattttctttctttgtagcacataaaatgaagatacattttacaatcaatgctgtctttgattctatgaaagactaattatcataaagttggtatgcaaattcaaccttgtaagacaaacatattgtacaactgaaactgaataggcataattgtccacaaaaaacaatcccaacaatygtagtttttgtattatcaacatacatagtttcaagtaaatttacctagaagataattattaaaaccggtaactgaacactgaagaaagctctttgcccttttaagtgaagatgagaagaaatttaactttatgatgatgtcatgtaaaaaatatatataactttaattttaggaacaccggtatgtaaacattctgtatcctctctttctaaacagaaggtagaagctatgctagtgttttgcattgtaaaacacttgtgttaacaatttcttaactcatcttctcaaaggcatcctttaaaattatagcctcgtactttataatgaaagtagagaatttaagtttgtctttttacacctcagaataagaaagcaagaccacggtggcttagaggcaatgggatatggaagctaggagtgctttctgcaggagagaagtctttcattcaacagagaacatagttgagtgctttttgtgcttggagctagaagtgcagaggtgattaagacacaaaccattccctcatggaactcatgagcagagtgggcagggccatgcatgtagacaatctgttataaaaagaccagtgccataatgatggcatgtttgaggtgttccaggaacgtgaggagaaactgcctagccctgtctgggaaatgtctaggagggcttcatttaagaagtagcctttgaaatgaatcataaacagtaaatggtgattcactgtgtggataaggggagggaacagcatttctgggaagagataatagacaagcatctttctcagagtgctgcagtgatgtaaatgcaaggttcactaatttgtggaagaattttttttttaacctggtgatctaagaactagaataaggagtttatgaatcttgaggcttaattgtaatttctttatatttagataattatttaatatttctgtgctgtgtaaaagctgtgtgttaccacatcttttctagtctaatgtttgcccatcgtccacgatcttggagggaaatgcctattagatttgctgattttggagttctgcatagaaatgaactgtcggggactctcagyggcttgaccagagtgaggygcttccagcaggacgatgctcacattttttgcacagtggagcaggtaaacaataacacagagtgaagcagtgtggtcacaaattgagtgtgatgccccgcacacatcttgtattctttcagagttactgaaacatagacgtttggtctagtctctgagattcattcagctctaacctgctgtgattctctaaattaggtcaatagattaatcatctcttgacatgaaatatattccttcagtgattttattaacctaaattccattaagtggagtattttaagggatttggtggaattctggatgttttgtttttcagtatcgcctagaacttaaaatttactttttcaagtttttgtgttaattcaagttaaaattgccatgcaaagtttcactgtcaaacaatttgacctaattgatgtttatataacaacagcagaatatacattctttggtttcatgttggatgggtaatgtgccagtgttgtatccaatgtgcttcatgtggggtgggtaatatgccaatgttgtaccgaggtgtgagggaggtayatcttacacatgtgtgtacacccagtcatcacgcttatgaactacaaaaagctcagagtatttgttctttgaaattgcacrtagaatatttactaaaatagaccatattctggaccataaaacaagtctcagtgagttgaaagggatgcaattaaaataaaatgtttaattaaccctaatgtttaaccctaatcctaactgaccacaatagaattaaaaatagataacacaaaatccaaaggaaaattagacaattttatataacaaatgaaataaaaacacatcaaaatttgtaggatgcgatttaagtggtagagggatgtttatagcactgaatacctgcattagaaaagaaaaatcaatgacttagcttttacttaagatagaaaaagaagaacaaattacacccaatgtaatggaagcaaaagaaagaaaataagaaagagcagagcagaaatcactgaaatagaaaataaagagtaaaaataaaacaaaagctggttctctgagaagatcaataaaattgataaacctttagtcagactgatgagggaaaaaagacaaataaaaatgtcaggaatgagacagatgtcatcactacagattctgtagctgttaaaaagataaggcagttttatgaataactttatgctcatacatttgacagcttagatgaaatggataaatctttgaaagacaaaactattaaactttactcaagaagaagtagatcatctgaatagccctgtgtctactacagaaattgaattgatagttaaaaaccttcctacacagaaaactccaggccaagatggttttactggtgaattctaccaaacattaaagaaggaataataccaatctagagatactcttccagaaaattgaagaggaggaaatcttcaccacctcatgaagctaatgaagctaatattgctgtgatagaaaaataagacaaagaaattaaaagaaaactactgaacatctctcatgaacataaaatcaaaaaatttaaacaacattttactaagtcaaatctagtaattttttaaaaaggacatcttaatcaaatggactgaatcccaggaatgaaaaggtagtttaacattagaaaatgaatcattgtaattccccacattcacaaactaaaaaaaagaaaacaaacaaaaagacaaaaagcatattatcttctcagtagatgcagggaaaagtatttggcaaaattctacatccatatctcataaaaactctcaaaactaggaatggaagggaactttcttaacctgataaaaggcctctatgaaaaacctacagctaacytcatacttaatagtgagagtctgaatgctttactcttaaaatcagatattaggtaaggattatctcattacttctctgatcattgtactgcaggttctttctgatgcagtaagttaagaaagagaaataaaaaacacctagattggaaagaattaaaactcttgtaaatgacatgatcatctatgtagagatcagatggaatctacagaaagctattagaagtaaggtgaatttagaaaaattgtagtatggaatgtcaacatacaaaaatgaattgtatatgcatttcataataataaacccttggaaattgcaaataagaaacaatttgtaatagcatctcaaaacatatgatagtactttgggataagactgacaaatatgttgctatggactgaattgtgactcccaaaatttatatgttgaagtcctaacccccaatgtgatggtgtttggaaatggggcttttgggaagtaattaggtgtagatgagattatgaagatggaaccctcatgatacgattagtgcccttttaaggagatgccagaggctttctgattctctctgccgtgtgaggacacagtgagaagtcagccgttggcaaactaggaagaaagccctcaccagggaactgaatcagctggcacattgatcttggatttcccagcctgcagaactgtgaagaataaatgattcttatttaagccacacagcctatggatttttgttctggcagcccaagctgagtaatacatacatacacaacctatacagtgaaaactttaaaacattgctgagataaatttaaagaaggcctaaataaatgaaatataccttgttcgtggtttggaagactaaatattattaaaatatcarttatccccaagttgatctataaagtcagtacaatcccagtcaatacccaagcagaycttttttccctgtaagagttgacatgctgattctaaaattcrtatagaaagcacaagaacctagaatagccaaaagaactttgaaagataaaaacaaatttggaagagtcactatgcttkgtttcaagaattatgagaaactacagtaatcatgctggtctagatagataaatcagcaaaacagagtctagaaatagacacaaatatatggacaactgatttttaattaagattcgaaggcaataaaatggaggaaaggtaatatgttcaacaaatgatgctggaatgattgtgtatccatatgcaaaacatgaggtatgaggattcatacctcataccatatgaaaaaattaagatgaatcacaggcctaaatgtcaaacataaaaatacaaaacttctagaataaaaattggggaaaatctttgtaattaggtgataggtgatgatttctcagatatgacaccaaagggcaatccataaaagaaaaaagttgataaattggattcctcaaaatttaaaacttctgctcttcaaaaaatactgatcatagacaggaaagacaggttacagactgggagaaaatatttgtgaggcatatatcaaataaaggacttgaatccagaatacttaacaaatattcaaacctcaataagaaaacagacaacccagttaaacaatgagcaaaaaagacctgctttggggaagatgaagcaggtgctttccctttccttccctctaagaacaagtaaaaaccttggatattacatataaaacaaacacgagactctgaaaggtgttgagaaaaagggcacactggctatggacatcaggacctaagaaacaacatggtagtgagttccttaggtgtttttgttttgttttgttttgccacatatattccagacttggcaaccaacagatgccaacaggcatcgataaaacaggccaacagaagtctgcttgctgtagccaaaggactaggaaaggggcagcctagaaagatagaaaagttttagacaatatctactctatttcaaccagacaccacagaaaaaactgtggccctttatatgccagctaaggctgattgagaagcttatattttaactctcagcaggctctaaataagtacctcaatacctgttggaatgggtaagagaaggcttattaggaagctgggaattttactcctgcattaacaagatcccatccccctcccccaacccagcagtgtcagtgaagactatgtggggagcctggacttttgccctcccctggaagtaatgaggtgcctcttccagtcctgcttgagtagtgtcagaagacgtctagtggaaagataagactttctcactgccaattggtcatgaggccatgctttctgtgtgcagtaaaggccatggaggggggctagaacacctgtgcaacccagaagtaacgaggagctcctctccccttacttcctttctaaaaggagcttggactgcttttcccacttgccagtaactgtccagtactgtcctccctctgctggaagagtgtcagtggaagtcagctaaaacaacatttaagatccagaggcttactataaaaccgaaaatgtccaggtttaagaaattgaaaatcactcatcatgctaagaacaagaaaaatctcaacttgaatttaaaaagacaatctatgaacggtaacactgaaataacaaagatgttacaattatctgccagagattttaaagcaaccaccataaaaatgcaattactaactaatgagcaattactaacacacttgaaacaaacaaaaattacaaagtcagcgaagaaacagaaaatctcaggaaagaaatagaagatataaagaagaaccaaatggaaattttgaactgagaaatataatattcagtgaatagattcatgagcagaatggtgaagacagacataatgacaagaacagaaattacacaatctgaaaaacatagagaaaacagactgaaagagaaaagaacagagcctgagaacagtgggatataacaagatatctaacattcatatcatcataattttggaaggagaggagactgaaggtgggagtgaaaaagtactcaaagaaataatagctgacaacttgccaaatttggcaaaagacatctacagattcaagaaagctgttcaggataaactccaagaaacctacaccaagatatatcatagtaaactgaaaactaaagacaaaggaaaggcttgaaagcaatgagagagaaattatgcattacctttaaagagaaaaacaatttgaatgatagcaatttctcattaaaaaacaaaaaacaaaaatcctggaggccagaaggaagtggcacaatacttttaaagtgctgaaaaaagaaaaaggaattttcaacccagaattctatgtctaaagaaaatacccttcagcaattgaggggaaatcaagacattggacccaccaaaagaatggctgtaggaagttttctaaacagaaaggaaatgatgaaaagaggaatcagggaactttaggaagaaaaagattgtgaaaataaaaacaggtaaatacaatatattttccttctccttttgcgttttctaaattatgtttgatcattgaagtaaaaatcacatgttctttctgatgttctaaatgtatgtagaagaaatgtttaagaaaattatactataaatggggtaaggtatagggaataaaagtttttgtacttcacctgagctggtaaagtgacaatatctrgactgataagttatataatacctagagaaaccaataaaaaaaaaagctatagacarggatacactaagagaacctatagataaattggaattgaattccagaaaaatgttaaagtaatccataggaagacaggaaaaataaaacagaaatgaataacaagagagaacaagaaggaaacaaaaaggcagtgtaaagccctaacatattaagtgtaaatggtctaaataaaccaattaaaagagattgacatagtagattaaaaaatatgacccaggctgggtgaggtggctcatgcctgtaattccagcactttgggaggctgaggcaggcagatcatgaggtcaggagttcaagaccagcctgaccaacatggtgaaaccccatctctactaaaaatacataaattagctgggtgtggtggcacacacctgtaatcccagctatcaggatgctgaggcaagagaatcgcttgaacttgggaggcagaggttgcagtgagccgagatcatgccactgcactccagcctgggtgacagtgatactccatctcaaaaaaaaaaaaaaaatgacccccaaaaaaaaagaagtcccatgatatgccaattaaaagctggagaaaggccaggcatggtagcacacacctgtagtcccagcactttgggaggctgaggtgggtggatcacctgaggttgggagttcgagaccagactgactaacatggagaaaccctgtctctactaaaaatacaaaattagccaggcttggtggcacgtgcctgtaatcccagcactttgggaggctgaggtgggtggatcacctgaggttgggagttcgagactagactgactaacatggagaaaccctgtctctactaaaaatacaaaattagccaggcgtggtggcatgtgcctgtaatcccagctactcaggaggctgagacaggagaattgcttgaacccgggaggtggaggttgtggtgagctgagactgtgccattgcactgcagcctgggcaacaagagcaaaactccgtctcaaaaaaaaaaaaaagctggagaactaggaaagctgatggtataactcccagtctaaggccaaaagcctcagtggggtgagcaaaggagggagctggtgtaagtcccagagttggtgggcctgagaaccaggagctccagtgtctgagaacaggagaaaataaatgtcccaactcaaaaagagagagaatttgcctttcctctgcctttgagttctattcctgccctcaacagattggatgaggcccacccacattggtgagggtggaagttgtttaccaattccactgattcagatgctcatctcttcgagaaacgcactcacaggcattcccagaaataaatgttgtaagggtggccagctgtctggcatcttttagctcagtcgagttaacacttaaaagtagccatcacaagccattatcctcagcaaactaacacaggaatagaaaaccaaactccatatgttctcacttataagtgggaactgaacaatgagaacagatggacacagggaggggaacaacacacactggggcctgtcggagggaagaggagggagggagagcatcaggataaatagctaatgcattctgggcttaaatacttaggtgacgggttcataggtggagcaaaccaccatggcacacatatacctatgtaacaaactacacatcctgcacgtgcacccaggaacttaaaaaaaaaaaaaaaagggtgtagtggctcatgcctataatcccagcactttgggaggctgaggcaggtgggtcacttgaggccaggagttcgagaccagcctggccaacatggcgaaaccccttctctactaaaaaaaaaaaaatacaaaaattagccgagcatggtggcgagcacctgtagttccagctactcgggagcctgaggcatgagaaccgcttgaacccgagaggcagaggttgcagtgagccaagaccacaccactgcattccagcctgggtgacagagcaagactgtctcaaaaaacaaaacaaaacaaaaaactagccattgcagttaatgaatgaaagacttgatgtctcaaatccatcaaattccctgcatttcagctgcctctctctggtttaagccactgtcatcttgctcctaattgactcagccagcttcctgatggggctctcttctaatcttgccagttcattccacatactgtgaaagaacacattgactcatgttagtcccctgcttaaacaaaacaaaacaaaacaaaaacccttcattgcctccccgttgttctcagcctaaaaaatccatacattcgcctggctttgaaagcacttaattttctctggcccctgcccacctaccacactgcccctctgcccttcagcccatcgtatgcagccccccgacttagtctgctcctctgtccacggagccttcaactcagtgtgtcctctgctcacagagctcctgagcttccgctccatgcagagcgtttgcttgtcccctgctgcagctcagtctcacttcctctgggcagcccctccgtgccgctctcctgtgcgcggcgctgccttttcacagtacggttccctcgcctactccttctccattccctgcacgtgcctagcactcaaacraaggttcagctcaggattggataagcaaccaaaacaggatcatcaactgtactccattaaaaacatgctttatttctgtctgacatgaagaattgtattttttaaaacataaatgaatttgatgttctatttgaatgtttcatttgctttgatttcagattgaagaagaaataaaggggtgtttgcagtttttgcaatctgtttactcaacatttggcttctcctttcaattaaacctgtcaacaaggccggaaaacttcctaggagagattgagatgtggaatgaggctgagaaggtaagagacacacyttgtgcttcctcttcattttagtygtatggaagacacctgagaggctgcagtcttcacaggaggatgcaataatttgtaatagaaattttgaacctggaaattatgagatagatatataggttgtagaatgtggttatcccattatctttgtgacggtgataataataccttacatttgcttcacacttaaagttcatatctggcttttatttatagtcctgcagtgctggtcactaatagctggcccaggattttaaagaaatcctctgattgctgtaactctcggtttgtgtggtttattttaaagcattgcctgttgagtcatcttagtccgactgtagagtcccagggctgcatggtctagatgtagatgtgcatagtccccttcgtagtcacgtcctgtcgtgccctgccctgtgtctgtctgaagacactcaagcccaaagatgttacatctaagctttgcaaaaccaagataaggagatcatcacattgcttttttttcttaataaacacaaaggatatagtgtgtttcctgtgttcacttttattaaaaatgaggatggtgtcatggccagacaccctgctctgcctgttagttctcctcttcttggaatataatagtccccacttatccatgggaataagaccccaagtggatgcccaaaaccctggatggtaccaaattgatggcaatcaggttaaggacacgtatctgttcatgccttcaacccacaaatttaatgccctttctttttttctttttttctttttttttttgagacggagtcttgctctgttgctcaggttggagtgcagtggcgcgatctcagctcactgcaagctccacctcccgggttcacgccattctcctcctcagcgtcccgagtagctgggactataggcccccgccaccacacccggccaattttttgtatttttagcagagacagggcttcaccgtgttagccaggatggtctcgatctcctgacctcctgatcctcctgcctcggcctcccaaagtgctgggatttaatgccctttcttttcttaactaagcactgttcatgcactgtggctggaactttcgcagtgtgaggtgcaacagcaaaaactagcatgaatttcttgttccttcttcactaattcacaacttacccaatggatagaagatttttttttaaccatagctcttagcaacttcagcataggagtcttttttccttgttaaatggataactttcaccttttcacttaaaggaagcattttgtggcttcactctggcatatccagattgctagtaacacaactcttgtgctttgaggccatggttcaggaaaataagggtgactgaacataagcactgtgatactgcatagttgatttgataaacatggcagctcccaagtgactagcaggtgggcagtgcacccagcatggagactctggacgaaaggacggttcacatcccaggtagggcagagtaggagagtgctttatcctgctgctcagagcagtgcccaatttaaaacttatgagttgtttatttctggaattttccatttaatattttcagactgcagtcgactgcgggtaactgaaactgagaaaaatgaaaccacagagaagggggactactgtactcctgggagcttaacacaccaataygagaaataagaatcagagaagccctggattaatagtataacaattatttttacgtgattaataggtgcagaagccgagcagaggctgcacagaagcagtttagccttgagctctaaggagggccttctcctccccactgacccgtgcccatcctaagctcttcttccacatccactgcatggacaaagagggccaaatgagatagcctatctaccctgggaaggatgcagactcagtttacctaacagccatgtggaagcaggaagaggaaatgaggacacagagctcagctctggagccatttgctccagactttaaagtctgaaagtactttatctccatgagtaaattatagaagatctataagcatcaggatccagcatgaaatggtgatgatgataacgatggtggtgatggtggtggtggtgatgtagcaatgacacccacttcctgagggtatggtgaacttaaatgaaggaatttacatggagtgttaggcatagtgccaggcacgtgtaagtgcccagtagatgtcaggtgttggtatcgttgtcattactccattcatttgaaacttggtggggtgtggggagctgaaaaggggatggaccaggtatagacctggcatggggagaataggctggaagtcccagcatttttgctcctttcttaattaatgggggtaaatagtttagcagccaagcctgaggtcacccaggggtgtgactggatggacctgcttccacttttgagatatttctctccaataactaaccctggcctggaaatcactgaggtgagcattgaaatattttgtcttcagaagtgtctgaaatggtttgaaagagacacatcttcatgtatccgatgctctctcggctctggcagctcctactgtgccctcctgtcctgtgtcctccaaggcccgaggagcagcagtgacccctgctttatcctcttctccaaaacttggcctttccttggctttttagcttcttgcagtccccagaattctttccatcacttggtatctgctgtaggagggcctcatttgtcctggaaacatgtacctgtgttccttctcctttgagaaacagagtggaacaggggagcgcagcctccaggccccggaagtgtctccgtggggtggctttctctggtcctaagtagaaaagaagctgcttctgtaagatcaggcctatgcgggacactcccaggatcccaggaaaaaaatctccgtctctctcaagatcagatcctgactgaggtcctgggaaaggctgccaggactccaggagtcagctttcccaggagtcagctttcttgatgatggcagcttcggccctaagactctgccacggctctgatttccccatgaggcgcgtcactcccaagtctgccccctcatgggcacccgtatgttggaggtgatgatgggagtttggctcgtgttttggcagtacttttggccaaggactcaggaatgcccacgtgcttcccagggaagctggattcacgggaatactggaagactctgggaaatttttcattaatacacttgcatcctcaccttcaatgtggaacatcttcactacaagctaagttgaaggcatgtggtggcttaggctgaagacaaaagtggagcctcatgcctccacacccctataaattataagtgaccctcccrgacacgtgcagaggtgaaggaaaggcaaaaaggaagtagtaaggcctgccctcttggccttcttacccacccagactcagagtggaagagggagtgtgatcaaggcttttctgctttttcatgtgtggaggcccgtcaccaggaggcagaagctggttgatgtgtagggcacagggggcctgtgttgggaggagggtcaaaagcgacccctccctaatgcttacctggaattcactggaacaatttataaatgatcttttctccccagttgaaatgtttatgtttctttgagagcaggtgccaccttaatcatctctgtgtagtccctgctcaatagtttattgaatgtaaaagatgctcaataaatatatgttgaactaacatagactgtaatgaagagttatagtaacttttgtgagctgtatgtaaaaaaaaaagatacagtgtataattgtatcttttttcttcttttgaaaaagcaactgcagaacagcttgatggactttggagaaccgtggaaaatgaacccaggagatggagcattttatggccctaaagtgagtcgaccacatgcttcaaaacagcaaaatgtaaaagaaaaataaatactcttttctgagcaaacattatttaatttgtagattgacataaaaatcaaggatgctattggcagataccatcartgtgctacaattcagctggacttccaactgcctattagatttaatctcacatatgttaggtgagtgattgaatgtgataaatattatagtactratattctaattttttgtcatttgagtattagcaatgcaaaaataaacattagtgaatgtctagtatatgtgctatacacgcaatatatatttgtttacctgatcataatccagttgcgaatcaacttgaattttctggtctagtagcgggaggaagataagtaaacatgagagtagagatatgaacaaagttccatgaaaatatgatccaggctgctgactctccctgagttacagggggaagacttcacaaaatgctggcattgggtctgtgtcttaaggatgagatgttttcttgaaaaagcaggggaaaaaaggcaattttatcactgtaaaccaacaacttctttaaaaataatacagtaaaattaactctgtgtgtgtgtgtgtgtgttgtgtgtacagcttgatggttatgattctgttgttctcttgtgctgctcctttgtagtcacacactcctcctactcctaacccctggctgccgttaatgagctccccatcaccatagtcttgccctttccagaatgtcatgtaaacggagccatgcagtatcgagccttctgagactggcttctttcacgtagcacagtgctgtggagattcatccatgattctgcaagtattgatagtttgttcctttctgtcactgactagtgtgccattgtggatccaatctctcaytgaagggtgtttgggttgcttccagttcttggtgattatgaatagaactgctgtagatattagtgtataggtttttgtgtgaatagaagttttctttaggttaaataactgggaatgggtcatatgataattaaatatttaactttgtagaaactgccaaactgttttccagagcagctgcaccattttgcattctcacctgcaatgtgtaaagagttccagatgttccacatccttgccagtacttgatattgtcaggttttgtttgttaagtagttctaataggtgtgtagtagtatttcattatcttttgattttacatgttttttagtggctaatgatgttaacatcttttcatgtgcttacttgctattcatttatcctctttggttaaaagtctgccaaagtctttttgctcatttttaattgagtgatttgtttccttactgttgagttttgagaattctttatatattctagatactagcccttggaggaatatatgatttgcacatattttaccctggtctgtagcttgctttttcattttttgtaatatctttactttcccattcatcctgagttattaaatacaataaagtttaatttctccatttttttcttttatggatcatgctttggcatcatatctataagctctgcctaagtacaggccatgaagattttcttctatgttttatattaaaagttttctagttctaagatctgatgtgagttcattgtttgtgtaagatgtgacatttgggtcaagattcattgtttgcatctaagtgtctcattattcacacatcagatgatgtaagaacaggccactatttcaccatcgacttgcctttggatctttgtcagaaattagttggacatatatatgtgggtctgtttctagattataaattctgttctatgggaccactgattatccctttgttcactgtgtgaacatcaccgagtgtgcttacgcaaacctgggtggtagagcctactacatacctaggctaatatggtctagactattgcttctaggctacagacctgtaaagcatgttactctactgaatactgtaggcaactgtaacacagtggtaaggtatttgtgtatcaaaacatatctcaacatagaaaaggtacagtaaaattaggtataaaagataaaaaatggtacagttgtttaggacagttaccatgaatggagcttgcataaccggaagytgctccaggcgagtcagtaagttgtaagtatatgtgaaggccgaggacattagtgtatactactgtagacattataaacactgtacatttaggctacactaaatttaaataatttttttcttcaatagtwaattaagcttagcttactgtaacttttttactttatacatttttgacattttaaaacttttgaatcttttattatagcacttaccttaaaacacaaatacattatagttgtacaaaaatattttctttatctctttattctataaacatttttctattaaaaacttcaaaaatttttactttttaagtttttttgttaaaaactaagacacaaacacattcatcagcctagtagcctaggcctrcacaaggccaaggttatcgatatcactgtcttccacctccatatcttgtcccagtggaaggttccaggggcagtacacgcatggagctgtcatcacccatgataatagtgccttcttctggaatacctcctgaaagaccagccccaggctgttttacagctaacttttttttttaaagtaagtgaaagaatacaccttaaataacaattaaaagtatagtgtagtaaatacataaaccagtaacagttgtttattatcattatcaagtatgatgtacagtacataattgtatgcactgtccttttatacagctggcagcatggtagatttatttacaccagcctcaccacaaacacctgaataatgggaagatttttagctccattataatcttactggaccactgtcatgtatgtgctctgttgttggccagaacactgttacgcagtgcatgacggtatatatatatacaggcacagcttgttttatcatgcttcacactgtatagcacttcgcagacgttgcattttttataaactgaaggtttgtggcagccctgtgtcaagcaagtctgtcagtgccatttttccaacagcatgggcttacttcatgtctttgtgtcacayttaggtaattcttgcagtatttcaagctttttcattattattctatctgttatggtgattagtgatatttgatattactcttataattttagggggcaccatgaactatacccatttaaaacgatgaactttaccgataaatgtcgtctgttgtgaccactccaccggcccctccctaatctctctccctctcctcagccttccctattccctgagacacaataacattgaaattaggctaattaataaccctacaacagcctgtaaatattcatgtttaaagaagagtcataagtctctcaccttagatcaaaagctagaaatgattaagcttggtgaggaaggactgttgaaagcccagayaggccaaaagctcggcctcttgcaccagttacccaagttgtgaatgcaaaggaaaagctcttgaaggacattaaaagtgctactccagtgaacacaaatgataaggaagtgaaacagccttcttgctgatgtggagaaagtttccctgaagccaaagactaatccagagcaaagccctaacttttcaattctgtgaagactgagagaggtgaagaagctgcagaagcaaagtttgaaactagcaagaggttggttcatgaagttaaaagaaccatctccagggccaggtgcagtggctcatgcctgtaatcccagcactttgggaggcagaggcaggtggatcacctgaggtcaggagttcaagaccagcctggccaactccatatggttggtgaaaccccgtctctactaaaaatacaaaaataaaaataaaaaaattagctgggcgtggtggtgggtgcctgtaatcccagctacttgggaggctgaggcaggagaatcatgtgaatccagaaggcagaagttgcagggagccaagaccacgccactgcactccagcctggacaacaagagtgaaactccatctcaaaaaaaaaagccatctccataatataaaagtgcaaggtaaagcaacaagtgctgacgtacaagcttcagcaagttatccagaagatctagctaagatcaatgatgaagatgacaacactaaacaacagattttcaatatatatgaagcagccttctattagaagaagatgccctctaggactttcatagctagaaaggaaaagtcaatgactggcttcaaaacttcaaaagagaggctcaccctcttattaggagctaatgcagctggtgactttaagttgaagccagtgctcatttaccattcagaaaatcttagaacccttacgaataatgctaaatttactctgcctgtgttctagaaatgcaacaacaaagcctagatgacagcacrtctgtttacagcatgatttactgaatattttaagcccactgttgagacctactgctcaggaaaaaaaaaaagattcatttcaaaagattactgctcattgacaatgcacctggtcatccaagagctctgatggagacgtacaaggagattaatgttttctcatgcctattaacacaacatccattctgcagcccatggatcaaggcacaattttgrctttcaagtcttgttatttaaaaattcattttggaaggcatactacacactacatgccatatacattaacaacctcataagcaatattatttttgttttcaatcatagtacatgttttaaagagcttaggaggagaacattatattatatttaccaaatatttaccatttctgttgatcttgtttcattcctgatgttccagggttccctctagtatcatttctcatatatctgaagatataagagaataaacagtttatttaaagcaggtcggttgaagatgaattgccttattttctttcatctgagaatgtctttattttgttgtactttcaaagaaaataaccttctttgcttgtacaattctgggttgatagttatttagttttaatattttaaaaatattgtttaaaaatatatattaacttagtagtatagcaagaggacgcttctgaggttaatgcaractttgaacactcatctttttttttttttttttttttttgagatgagtcttgctctgttgcccaggctggagtgcagtgggacaatcttggctcactgaaacctccgcctcctrggttcaagcaattcttctgcctcagcctcctgagtaactgggactataggcatgcaccaccatgcctggctaaactttgtatttttagtggagacagggtttcaccatgttggccaggctggtctcgaactccttacctccgcccacctcagcctcccaaagtgctgagattacaggcgtgagccaccgatcctgacctagaacactcatcttctaatttaaaaacagagacatccatttttgtgttaacctttgttgcatctcatttccagagtaagtagacatgaaataaaatttatgaagggaaaatacagaacaattttgatgcttacagtgaggtaaatattagaacrttactgctccaatgattcagtgaggatctcgaaatgaattctgaagtcttccaatgtttgcatttattggaggggctcccgagttctatcaacttgttttttcaagtcttgttctcatcttgtgcataaatgttaacgcttcccaaagtaaaaacttagctttcttacttttactttktattaaatttaatacaaaatatgacctgagtagttaaaaaatattttacattatttgcagtaagatgtcattagccctttcaaagagcaaattttaaaacttcaatctgggtgaaagattggctagttttatagaaagatttgccgtcttaaactcaagctgatttttctatttttatgtaaataactgagatgccatcttattaattcttccaaggtcatgtttgtaaaataaacattacatgagagctttcctgtcatctacactgkatgttgtttagagtgttgaacaaatttgagttcctaagttgtaatctgtcctcatgtggtctatgctatttgcacgtgtgccactacacgctgagatgataacgctgtacaattttaaatggtagcagtttctgtaggctgtaggctgaaatattttgatgaactgcttagtttgggggttttattttttaagttatataatttattttcttgcaaagtaaaaacaaaaaatattgttacacatgctgctggcttttatggtttctgatgagaaatatgcagtaattgcagtcacttttcctttatgtgtcacacgattgtgatgtgtctgtctgtggacttattcaagtctatgttgtggcggtttgaacttcctgaatctgtaagttattgrtttgcaaacgttgtattgtttttccatatttctttggtactatacctccgctccttytgggacgcaggtgacctgaatattagaccttttggtatttttccagttttctgaggctgtttatgcttccttcagtctttctttgtatatctctcagattggatacattctatttacttatcttcaaattcaccaactctttaccatctctgttgctactgaatccatcgaatgactttttaaaactttctgtgattgtagttttcagttctacaatctctgttgttcgtgttttgtgtttcttcctgagactttggtctttccagtcactccaggtgtgtttaccctgcttcctggggtacagttataatggctatttctagcctttggtaattccatcatttgtgttttcttgctgctggactgttgtttgtcttttcttctcacaaattgaaaattttcctaatgattcatatgctaagtaatttaggattatatcctgaatgtcttgaatattatgttatgagatgctgtgtcttgtttaaatcctaaggcggttgtcttgttttggcagtgaatctgcctggttaggttcaggtggaaatttccagcccacttttgtgggctgcggttcggtgtcagttcagttatcgaagcctttatagtgatattcacatctgttccatgtgttcgccacccagtggccaagtcccataggtcataccgtgtgccaaaacggaaaagcttctgggagttgacctctaactttttgcctgattggtacagtggagttagtaggactccgaaaagtctaatctctccgttttggaggagcaagggtcagaactattagagagaaagtcaaaccttcaggatcagtcctacaacaaaattgcttagggccatcagaatgcaagtgaaactactcatttaaggaggacgtggaggagaaacaaatcagcccagccagccatcataggtgttgtgtggcaaatggcgagtaggcaagcaaaggtggaagcagtggattgcagaccaggtaagaaatgatgacagttggagccaggtggcatagagatgaacaaagtaggggtactggaagtgtattttggaggaagaactgatgtgatttgctcaggcttatgtatgagaggagagagagaagcatcaaggtcatcaccatgattgagtaagggtttttccctaaaaaagcaggggtggatgagagtgtgctgttgtcattcattacattcagcatgcagaaaggcatcagataaaagttaacattcattcctgtgaaatgaacagaaatttccttatcacgataaagagcttttatcagaaaacagcaatagcatctcaacacagttgggaagaagaygaatatgactactatttgtattgttactcaaaattattctgggattacaaatacatgaaagcaagagataaaattattattagtagatgttaaaatatagagaaatccaacagaatcaaatggagaaatgggcactaataataatggaaggtraaaatgcaaaaatcaatttgccttcataatgttagcaataatctgctaggaaatgcaatggaaaaaacatttcagaagcaacagcaaccacaaaatagaaaatatgaataaacttaataaatataaatatagtcatgcatccccataaatgtagtcatgacagggatatgtttggagaaatgtgtcgttaggcaatatcattgttgtgtgaacatcacggagtgtacttacacaaacctagatggcataggccactacacacttaagctgtatgggatagcctattgctgctagctccaaacctgtgcagaatgttactgtactgaatgctctaggtacttgtaacacagatcactagatgataggaatttttcagcttccttgggtgcaggacaccagcgtggctcatgtatacatatgtaacaaacctgcacattgtgcacatgtaccctagaacttaaagtataatttaaaaaaaaatttttttcagcttctttataatctcgtgggaccaccatcatatctgcagtccattgttgaccaaaatgtcattaggcaacacatgactatagatgttatttataagcatacgctataagtttttctccaagaccacaaaaaagagttatttaaatgaagattcgtaccacactttggaatgagaagaatcaacattgtgaagttattctcttcaaatttatctattaatctaatataattgtaagcaaatccactggggttattttgggggaatttggcattcattccaatgtttatctgatagcacagatgtgtaatcatagtttatgtcactatttgctcttcttaagtctagacatgattcaaagaaatgatgggacagaaattttggatacccaggctctgtgaaaggatcagtttgcttctctttcttccctacacaaaatcaacatgatgggatattcaggaatatttcatactggtttcaatttttgggatgaatttcttcatatacctgcataggaatggactcaagccgctcacccctaccccaaagcttcctgtagggtccagacagagagttttgcctgcagttattctataatggctcttagcagaaatggttggcagtgatgatatccagttacaactcatttgaagtaggtttaatgaatgggtttctctgtttttgtttgttttattttattatttatttgttaaatttgtttcatttattgtagtagtagctagctggtataatttttagataaaaatttatcaaaagaactttgtaagtgtcgcatgtcacatttgttgcaataatgtgaaatttatctttctgagaagcttgtgcttgtgcagagatcttgaagtggcttacttcattacaattaagtcatcatttgcttttttcattttttttkcctaaggggaagagggaataattaaatgtaagatacacctcatgagggtttcagggaatttgaccagtggacttcaagaacacatatcaggaacattttaaaaatgaagattataatgtgggagatagtggcaagaatgggggtgcatttggatcagatgagattggctgtgagttgacattttgtgaagctgagagagggtatgtggaagttcattatactcttctctctacttttgtatatgtttcagtgcgctctaataaaaagtttttaaaataaaagaaaaaagattagcaaagaaagcaatgagaaaacaagacagtcacagaacaaataaggttaatggagagatctgatatcactaatctaaatctattctcaaaattaaatataaggctagaagatagttattgaatcttaggaaaagacttaaatgtataattttcattttttagtaaggatggggatgataagaagagacctgtgatcattcatcgagccattttgggatcagtggaaagaatgatagccattctttcagaaaactatggcggaaaatggtaagtgatatggaaaagaaaaactatatgtctattattctttttaatttttattaatttactcatttttcctttttaaaaatatttctattcttaaaaaatcatgtgtaaaagaaaaaagtagtaacaaaagaaagggcctttcctgccttgtaattagcaattgtccaaacagcaaataaagaattcttattcgatttgccagatcagaaaataaaaactaagggagagtggcataaaactgtaccatttaccttttgggggactcggtagaattaaagttatctttttacctgtttcaagcccttcagagatctagttgctgtcctgaaaacatgtgacccacactcctaggtaccacctcttgccctccagccatccttccttcaacccatattgtttgcctttggggttccctacagccactgaggaggaaaacatgtaaacctgattcataaatggcacaaactcaaagaggatggctcagcagcacagcccatttaggatgacagtggggaagggaagtgtcctaaagtgcagaattttgagtggtgcatcttgtggtcytttttgagtggtgcatcttgtggtcctttttgagtggtgcatcctgtggtcctttttgcccggaaggaagaatggccggagataaggagttacatggatgcacaggctctagttactgctttggccacagagtcaaagatttagaactaattagattgaaaaacaaattacatagatttgggaagcagaaatgtggatgatcactcagaatgggccaacagaggtggtattgccaccaaaaggcccccgctgttgaggaatttttcagtattccaatacaagaggacccattctgttaaaatcagctgctttttcccctagttgttgctcaatggctcatgggcaaagtggccactggtggataggcatgggctcaaagacatggactttgcctcactaagttccatctggctacatctcttctgagaattcaggttgccatcagtcagtgattaattgtgatcccccgggatggtaccataacctggggtaatagccagtggtcttgtagcaggttgattacgttggatccctttcatcatgtaaggagcaatgcctcattctcactgaagagagactcactgtggattttgctttgctcttctttgctgccatgcttctgccagkggcaccaaatatgtacttaggtgctgccaggaacacaacagtgcttctgactatgaaagagattttatagcaaataagtaaagcattgcactgacattaagggattcactactatcaccatgcattcagaagcaagtggctttactagcagttatagcaccagctggcagacaacatcttgtgatgatgtatcctagtatgtggaaatgctgcaaaccagcaaccacctgtgaaatttctacctcccattccatttttagaaattggctaagcatctgctcatgcagtttagctctctcttcagaaactactgcccccactgctactattgccgggcacagtccctgcagctcccactgtggacactgggcaccggatgatactgctagggtcactgcaaccagttcctccaaaagctccatgtctctgcatcacctttccttgccataatggattccatgtggtgcctccttctccactctgtcttaagtcagagtgccatgtttatacattagcagaacctagatcacacccatgcatactaccattcatgtccagcgagactggggaagcaaatttttgagcaggaaacataaggtggaaagtttcccaaacaaagtgtcttccaaaagacctgggtagctagagagtctgtgtatattcctgatattttgtgatcatagagaaatatacttaggtatcatggagtttctaagctgttgaagttacagttaagccaaaagtatgggtatgaatatgtatgccgcctgagtatgagttaacatgtttatatttctttccagttggttttaaatagtttaccataggtaagagatgatggtgttttgcattagaatggttgcagtgaaagtggtttaaagaaaagagagagaactagtgaaataggagatggagagggagacaggaggtggttggggccagtgcactgagcatgccttcctttgtcgcagagacggaagtatactccctgcacttcatacatccagacttcagacagcagtcagccttgtggggaaatctccccaggagccaaaagtaaagatggctaaagtgtgggtccttgagaggagtagggctggggatgggataaggacagagctcaaaaggaaatatgtagttgccattatataccctgtatttctgtgttctaccatttatcatgtattgttttgtgtttgtaatttgagaataaatatataaatatgcacatttataaaatgctatctgaaatagtcctccttgcatgtcctttcaccttcagactaaatactcactatgacagggaaagggcaaacatgtcccacagcggacactgtttatacctaccctgccatcttttttattctagaaaaattatattttgaaataattgtaggttcgcatgttgttstaagaagttatatagaggccggatgtggtggctcacgcctgtaatcccaacctttgggaggccgaggtgggtggatcacctgaggtcaggagttcaagaccagtctggccaacatggtgaaaccccgtctctactgaaaatacaaaaattagctgggtgtggtggcaatggctgtaatcccagctactcaggaggctgagctaggagaatcacttgaactcgggaggcagaggttgcagtgagccgagatcacgccactgcactctagcctgggtgagcaagattccatctcaaaaaaaataaaaaagaagttatacagagaagtccagcacactctttacccagttttcctcaatggtaacatcttgcaaaactagatacaatatcacagccaagaactagacattgagactgtccaccaaccttgttccgatttcaccagcctcacatgcactcatttgtgtgaacgtgtatttagctgtgtcacacggacagatggtgtaaggccaccagtcaaggcacaggacagtccatcacttgtaaggctccctcctgctgcccttttttccccacactcaaaccatcccaccctgtcctcctatctgacagccatgaacttgttctctagctccatcattttgtcatrtaaagaatattacataaatggatttacagagtacacaaacttttgaagtaggctttttttttttcactcagtggaattcccttaagagccatccatgttgttttgtttcgagataaattagttggttccttttttttttttttttttttgctgatggtgttccacgttccacagtgtggatgcaccacagtttggccattcacccgctaaaggacatttggggtgtgtgtttcctgtttggggctattataaataaagctgctatggacgttagtgagcagtattgtgtgtgaacctgcgctttcatttytctgggacaaatgccaggagtgcaattgctggggcagacagtaagtgcatgctcagccctttgggctgtctgccagctcattctacctgcacttgtgctatcaaaattccaaaattctcctttcatttactttgctgccttcaaactttaatataatttagttttcttccatgctgcgctactgaaactgccctcttgtgaagtctttaaaagaatctttggttatttgaaaatcatgtaataagtagccattattacactttgaaaatacatattttatatatatttttcaggcctttctggctatctcctcgtcaggtgatggtcatccctgtggggccaacttgtgaaaaatatgcacttcaggtaaaatcagaggtgtttaaagtacataataatcttgcatgtattctgtgtaggtcatcgatttggagtgtccttcatgctttaaaatattgcagaaytgacacattagcttaaaccgtgttttcagcaggtgggagtaacacacgaatcatgtctctgcagctgtctcagaactatttcattcttaatgttttttgagaaattagtattttaaaacatatcataattattcatttctacacagctctattagggaagaatattatctgttgctgtgtcacaagtgaccccaaaacttagcagctttaaacaacaaacattgatgatctcacagttcctacgagtcagggtctgggagcagctcagctggtggattctggcgcagagcgtctcctggggctgcagtcaggctgtcrgccagggctgcggagctcggggctcgctcacagttggtggatgcagctcctcatcacctgggtgcttgcttgcctgaatgtcctcactgcatggtggctggtttcccccagagcaagtgatctgagagagatgggagctgcagccttttataaactagtctcagaaacgatgcgccgacacttccgcacttctttatggtcacgcagacccgctctggtatagtgagcagggaactatacaaaggtgtgaataccaagagtggggaacaacggggtcttcttggaggctaggtaccataatgtaacagtaaaggtgtttcattttcttctaggtatccagtgaattttttgaagaaggatttatggctgacgttgacttggatcacagttgtacactaaataagaaaatacgaaatgcacagctggctcagtataattttattttgggtaatttaagtttgtatatatttttccaaatgcttttttttcccacttcaattccaaaagaccaaataagaaatatggttcaactacttgattatcatgatttgtctatttaatacttacacaaaaggaagagtccatagcattcctagcttagctgttcctaggtactctttgttgtttgctggaagaagagttgtaaagtttcacctgaatcccctgggatagttttactagcaatagttcatattgcaagcaaacaacraaaacaactctgaaaatgatcccatcagtagaattatatactttatatttcagcctcacaggcctgtaatattttccctcacttttctggcttattaggaaactttgggattaaactaacagaaagaaaagatcccaaatttaaaatgatctaaaggaaaagatttagatgaaaagtaaaatgtccttttagcatatgactaattagatgcagaatctaaaatttaggctttaaaaatgattccaaaattaagagaaactaacactgatataactgcaggcacagtattgctatttcttgtaagttgagagtctgtagaaggcgaaataaatatgcatagcattgttctattgacagtgtttcaatgataatgtttgacaccagagtaggtattgtgctgtttcagtcaggcttcttatggtggcagaaatctcaacttggtttagacaaagacagcatttgttggaagggtcttggagtatcccatgacatgaaaggtagaattaaatagccaaaccactagaagagcaatcaggagctcaaccctcaccaggagtatttctccccatttctcgttcctgtcttgctctggttctttatgcttctcttgaatatctaccttattccacttatctgcagaccggtttcttccttctgtgtggcaagaagcatggctrtagattcctgcatcatctcacaatatgggtcactagagagaacaaactttttacccacattccagaaagttctggctggctcgcatgggtctggtgtccactccttggctcatcaggtatgccaggtggagtcagcgtgagcctgtaagagctccccgctctcatctgcaccctagtgccaggtggggtcagtgtgagcctgtaagagctccccactctcatctgcaccctagtgccaggtggggtcagtgtgagcctgtaagagctccccgctctcatttgcaccctagtgccaggtggagtcactgtgagtctgtaagagctccccgctctcatttgcgccctagtgccaggtggagtcactgtgagcctgtaagagctccccgctctcatttgcgccctagtgccaggtggagtcactgtgagtctgtaagagctccccgctctcatttgcgccctagtgccaggtggggtcagtgtgagcctgtaagagctccccgctctcatttgcgccctagtgccaggtggagtcactgtgagcctgtaagagctccccgctctcatttgcgccctagtgccaggtggagtcactgtgagcctgtaagagctcccccctctcatttgcaccctagtgccaggtggggtcagtgtgagcctgtaagagctccccmctctcatctgcgccctagtgccaggtggagtcactgtgagcctgtaagagctcccccctctcatttgcaccctagtgccaggtggggtcagtgtgagcctgtaagagctccccgctctcatttgcgccctagtgccaggtggagtcagtgtgagcctgtaagagctccccgctctcatttgcaccctagtgccaggtggggtcagtgtgagcctgtaagagctccccgctctcatttgcgccctagtgccaggtggggtcastgtgagcctgtaagagctccccgctctcatttgcgccctagtgccaggtgcagtcagtgtgagtctgtaagagctcccccctctcatctgcaccccaggaccacaagagctgttctctcaggtggacaatagagagatgggatcagaagtcattgcttccctcaagaaacttaactatcagaggatgaaccaaatgctcattagatgatatttaataktagtgaagaaaaacttgataaaaacatgtcatgggactgctgacttaatgtttggtaaattgctgatttaaaatacatttctttacctttcttttctgcagtggttggagaaaaggaaaagatagataatgctgtaaacgtgcgaacaagagacaacaaaattcatggagagattttagtaacttctgccattgataaactgaagaatctcaggaagacacggacactcaatgctgaggaggccttttgaagtccttccctgatatttgcttctgtgtaactttgttttgacccttaaaaatgtatttttcttaacatgttagtacttctacgactttggagccactgatgggtccactcatggcctcagctgagaaaggagacgatgaacgtgtagctgacatgcacgaagtttaatttactcatgtccacgggggacgtttagagggcacgtgggaaattttccagcaatcaatgccttgagaaacttaaatggggaaatattattcatcgagaaagtgaaacaaaacactaggaaatgattatgaaatgttagtgattttcaaaagatgggcttcaaataaaagtctgcagagttttttttaaataggagggaaaatcttattttctartatgtctcaggtatttttatgacttctactaaaattcacactgaaactttatcttctaaactggaatcattacttaattttaactaaccaacaaccacaaaagcagcagctactrctaaatattggattactgacaaaggaattcagttttgtggaatctggtgtttgcactataggttaagagttgccatttaaatgtttcttattcataattaggttttgttccgctttagaaaaaaataaattcccaaatgaattgcatcagtgtttccagcgtttcagctgtgggcttctaccaccactaagccgctcacctagagttgttacttttttgatgggatgacattccatggatttatgtactgaaatggatttcagattttaaagagaggaatgctctacgtgctcagaactgaattaaaatggcattatgtcaatagagaattcagctaccaaacaagaagtattgtttattttgcgatatgctgtgaaattcaaaagaaatgtaagaaataatctcttttcaatatactgatcatttagttaacttcctgagggatgtgaacagtgaaacagttggcaaacaaaacaatatatatcaggcttgtgtagtagtataaggtgcagattgtgtgatatgatttttattatttattttttgagacggagtctcgctctgtcacccaggctggagtgcagtggcgcgatctcggctcactacaacctccgcttcccgggtttaggcgattctcctgcctcagcttccccagtagctgggaccacaggcgcgtgcctccacgcctggctaatttttttgtatttttagtagagacagggtttcaccgtgttgttagccaggatggtttsgatttcctaacctcgtgatccgcccgcctgggcctcccaaagtgctgggattacagacgtgattcaccgcccccggccgtgatacgatttttaaagctaacattcagggcttatgtgccggcacttttccatgtattttttaaaaagtcattcagcaaacatgcacgtgagggggtggtagtcagaagaccgcggaatgaacgatcccgaagcacgtgggtgggaggagagcacctgtcaccagcgctttctcccaggtgtgctgtgacagaaaccggcaagggtctccgcaagctggggcctgagcgcggctccccagacggccgcgaccttccccaggcagggctgggctctggaccctcccctcacttcccagcgcctcgggccatcctgcttctccaggcctgagaggaactttctggaagtgctgcgtatcttcaagaggccggccagaagtgaaagccgcggcaggcctgagcgccggccccaggggaggggtccctcgggccctcgtcgtcccggggccgcttccccgactgtaaataagtgtctttaggatgaaacgccacgcgatagtgtcctcggaaccttcgcacgagatccagcacacaacatccgaccacacactggggcggccagcctcccgcgttcgcccgcctctgctcttggttgcttcgggcgcgcatttcggtccacggatgacctttaacaggtctcctgcagtggaaccaggggtgagggcctcgtccaagggcgtgaggggcgcgtggaaatggaacaacctcccaggctcgcatmctcctcggggacctcccagaaggctcaaccggaagaaaacccgcgacccgcgcgaggacagcgaaagcgcaaacgccggccgccaggagtcgcagcgcgcctgcgtccagttcacgctccggctcccaggcgcgccccgccccccggcccggaagtgcgcaggcgctggcaagatggcgggaggggtgcgcccgctgaggggcctccgcgccttgtgtcgcgtgctgctcttcctctcgcagttctgcattctgtcgggcggtggtgagtcaaaggctgggttcagcgccgggtggggctgagtggcagcagggccccgggagctgcgaggaggccgggcccacgggcggacgctgacgcggggaggaggccgagtgccgggctccgggccgcttgtcgctgcatctggagtctggcgccctggccgcccggcccgaggccgcccctccgctccggcgacaccgagcccgccatcgcggctgcggagccctggcacggagatggagcgcttgggggctgggccggggaggcggaactggagcgcgatgtcatccttcggtccctcgttgccggctgacctgaactgatgtctactctgttgacgtttcgtccctaagctttgtgttttctggctgaccagccgtgaggttttcatgagcagcttattggcctggtgtagacccgccgtgttaaccacacaaaayaaggttttcttgtcccgggwtaacgtgtttctctaattgtacgatccttaaatttagagcaatcgcaggcgctggctcagtcaataaaggatccgggcccaacacgcacattcacagtagttcccagggcagcaggtactagacgttttctattctagtaaatacatgtagttatctctagtagtttctctttgtttttataaaaattccctttagtatacgaagtcactttccatttttgaatatttattgtattttagattatgtgaattaagggtagatacacagccattttcagtagatagtcttcgtatttataccttttgacgtttctgcctcctctctttttccaatcccacgctcatttgtcaccttatttctattatttttccacttcatccatcaaaataaccttcagtccgtgcttctttcccttcagcaaatttcctctactgctaaaaccctgttcctgatgttggaatattaaaggctccctcaggactgtggaaatggaaggattacagcgggactgatggagacttgaaatctagatctggttttgctactgggatcttgaacaaattatttatcctctttggaccttggtcctcatctttaaagcggtggggttggtctgacgacctaaagtcatttctgctttgtgattctaagtgtccaccttccagccacatagtcacgggatcaaaaagagtattttgtagaattgttccttaatacagtgagtaaagtaggaccagttttaaacaagcattagtgtgttttgctaggtggaggctctgactataatttcatcactttaaagtgacattacttcagtgaattgaaactggcagagatattttactgattcttatttggatgtaaaaaacagcagtgcacttgaattttaaactcagattactttttagagaaagcacaagagttcttaactcttgcaggcttttgaaagcccttcttttcaggaatacttgcaattttgatcctttcagttggtaaaaatacattgcacactcattaggttggttggaaataagttgcagcttactgaagatgttattaaagtagagaactgttttgaactttggtagcgtaaaactgtaaatattatattagcaaatgtggcttatcgaagtaccagtgtgaaataatgacattttaaagttgatgccctgaggatgtcagtggcttcatttctgaattagtgaattcagatgaaaagaacacgggattggaaatggagagatttgggttctagttccagttttgccacagacttcctctgtgattttgcaaaaccctactgtaagttttttttcaacttacaaaatgatagtcttttttttaagcccttaatgtatacccagaattttctatacattatttgtatatgagcacctttagttttcacggccacgtgggaggcaggaatgaagtaatgttttacaagtgtggtgctcaccaggtcccacagctggccgtgggcagaattctgctttaattgcaggtgtctctgactccagtcccatgcttcttcccttccagtgcagtgtctacttgctaatgatcacgtctcttaaccttagaagattgttctctgttattcgaatcagtattataggagaataagcttctctcttgcctctcacagaaagtactgaaatcccaccttatgtgatgaagtgtccgagcaatggtttgtgtagcaggcttcctgcagactgtatagactgcacaacaaatttctcctgtacctatgggaagcctgtcacttttgactgtgcagtgaaaccatctgttacctgtgttgtaagtactgcagcttacttattctaaataaattcattgtaaactttaagttagaagaacaattcagacttgattattgggaagaaattctgaagaatttttatattcttttatgatttcccttttgagtatgtaagcagaaataaattaaaaaacccaatagacctttccatatcagctcactactgttttagttataatgataactgtcaagccagttgatgtctgctggaaatgcacttgacagaaatgttgctttgtaggactggagaagatctcagtctactagcatatctgaagcaagtctaattcgttcagatggattctgtgttctcaatagtgacagctagtgtacagagggggtggcagtgtctttctgccatagatgagcttttgaagggccagtgcttatctgtggtgagaagatggattcagtaaatgccggaatgcctggtagctctctagaacaaaattaagtggaacgcctgtcttatccagaataaattccagatagtccaaagatgtaatgtgaaaaatgaaaccctgaagtaccacagaaaacaccagatagttgctgttataatcccaaaatggagaatatttttctaagtatgaaataaagtttagaagccataaaataaagaattgatacatttgactcctaaaaattggagatttctgcatgacctaaaaaaaaaagcataaaggcaaaagacatggcaaactaggaaaaagcgtttctagaatatgtgacaaataatacagtaatatcagtaatatataaacacttcctaaaacccacacggaaaagatgacagtcttgtagaaaaacagtgttaggacatgagcagatggttcataggaaaggaaatacaaatagatatataacatgaaaaacatataagttttctcatagtatttaattaatacatttttaacccttagattggcaatttttttttaatttgattaactctgagtttgtgagagtataagggtcagatgctcatatcttattaataggtaatcaaattgatcaacctcttgtaggcgatttgccatatctgttaaacttacacatgcacacaatcgttgagctcgtagttgtacatgtaggaatttatgttatagatatcattatacatggatgcagataagtgtgcttattttttagctgcattgctcattaaagcaaaagattcaaaagaagtgaaatgtctaagaactgcttaatttatggtacacgtgtaatagaataaacaccttgtagccattaaaaagaactaggcagctctagaggtaatgtactgatagatgtccaaaattaagtgaaagtattggggaacattaaatgtaggtgacataaatgtgcctatgtgtagaatcagctctctctggaagcacagagcgtacttggcctggggagggcaggggctcccggcggctgggccagacgaggccggctcacttctcactctcctgttgtgtcttgacatgtgttccatgtacatgtgtcacctactttttaaaaaaccattaaaaaaagtgtgttttaagcacatcactgaaaataggcagatgtaaacgtattattttgcagatccaactgtttgcctaaatcaagtgatgccttacccatatttgaatgttttccataaaaagtggtttttgcattgataagaaaatgaatagtacttgcttcatcagcgcatatgccaaagttggaaccatacagagagaattaggatggctcttctgcaaaaatgacatgcaaatttgtgaaatgttaaaaaaaataacaaacatgggccgggcgtggtggcctacacctgtaatcccagcactttggcaggccgaggcaggtgaatcacctgaggtcagaggttgagaccagcctggccaacatggtgaaaccccatctgtactaaaaatacaaaaattagctgggcgtggtggggtgcgtctctaatcccagctactcaggaggctgaggcaggagaatcgcttgaacctgggaggcggaggttgaagtgagccgagattgcaccaccgcattccagcct

SEQ ID NO: 95324 - DNA, 121053 bp, Homo sapiens
taatctgactctacattctataaattagctatttttattttatttttatttatttttttttttgagagacagtcttgctctgtcacccagtctgaagtgagtgcactggcatgatcatggctcactgcaacctcaacctcccaggctcagcttcccaagtagctgggaccacaagcacactctgctaatttttcaatttttttgtagagatgggactcgctctgttgtgcaggttggtctcaaactcctggcctcaagtggtcctatcacctcagcctcccaaagtactaggattataggcatgagccactgtgccctgccattaacattttattttaaccaattttgttgtttttgagatcgctgttaaataaaagtaacagcaggacatacggaagaagcaaactgtctgaagaactccataggaacattcgcagtgtttcatacagtctcagactttcaaatgcaaagaaaaaaaaaataggttgtatctgaagactattctagtaatattttgaccacacaagctactggggtaggaaaaaaatggtagaagaacagtataagtgttcaaggaaaaatgccaccacaagaaaaccaaaataaaaaacagatgctccacatacggttattactacattacagaagcttttcatagttttccagtgctcttaaaaagtgctaatagaaaaagaaacaaaatgttttcttaaccatttacatgtatacatgtattttttgcatcctcaaacctgaaaaggaccaaatataagataatctatagggccgggcacagtggctcacacctgtaatcccagcactttgggaggccaaggcgggtagatcatgaggtcaggagttcaagaccagcctgaccaacacgtctctactaaaaatacaaaaattagccaggcatggtggcgcatgcctgtaatcccagctactcaggaggctgaggcaggagaatcacttgaacctgggaagctgaagttgcagtgagcctgagatcacgccactgccctccagcctgggtgacaagagcgagaccctgtctcaaaggaaaaaaaaagaaaaaaaaaagataatctatagactgagttatttgtgaatataactgatctgctcgactatattttataactttctagtatttagtagtgtgccagaacataaaaagcacctcatactggttgaatataagtgagtaaacaaaaatatatgaatctctaatctacaaataagactatacacaataaattctgatcaatctttactagttgttttatatcatagtctagtaaaatccagtatcttaagtaaaagaacagatggaactaaatatgcaagagttccatcattcccaggcatcaagaagaatttgaaattacaactaagatagatcacagaatacaattaaaaccaaataaccaaaacatattttttaaaaaacaaacagcctgacactcacctacatcaacccccagtctatccaaaggcctttgccttctacagcagataacaaaggtaagaaaagaaaatttcaccaattcataacacaattttttttaatgcttttaaggccgggtgcagtggctcacccctatcatcctagcactttgggaggctgagacaggcagatcgcttgagcccaggagctcgagaccagcctagacaacatggtcaaaccctttctctacaaacaaaaaaaaaaattaaccaggcgtggtggcctgtgcctgtagtcccagcgacttgggaggctgaggtggaaggatcacctgagtccagaggtcaaggctgcagcgagccactgtatttcagcctgggcaaaagagaccctgtctccaaaaaaaaaaaaaaaaagctttaaaaaagttattaactaatctaatctttcctataagttaatttccatcatttcattcttttttgattaagaggataggcaaaacacaaattttactgttttttaaatccaacaagtattcaattaaaaataagccaggcacggtggctcacgcctgtaatcccagcactttgggaggccaaggcaggcggatcacgaggtcaggagattgagaccatcctggctaacacggtgaaaccccgtctctactcaaagtacaaaaaaattagccaggcatggtggcacgcgcctgtagtcccagctactcgggaggctgaggcagaagaattgcttgaacccggaggcggaggttgcaatgagctgagattgcgccactgcactccagcctgggtgacagagcaagactgtctcaaaaaaaaaaaaaaaaaaaagataaaatcagcgaagggcctatcctgctctcaagagataaaataggtacataaatacctacaagatagaaagtgtaaatgccgcgagagatgtgcagaaaaagcattacaggagcccagagggagctgttaccacctcacagaaatataaccccttcaatctgtttaaaacaattttataactattaactccctttaggctcacaacagccaaccctaggagagtagatgtttacctaatattcaagatgaggaaactgaagcacagaaaggttgatcaagttccaaaatcacatagttagagcaagaatcaagatactttgtattatattttctccgggggagtagttcaacatatggcaagccttttgtaaaaggaaagagtattttagtattgtaagtaatcagttcctactgtgagcattttatacatagctatatccatatatacaattaatcttgatttccattaacaggtgtgcttaaagcaaggccaagcaactgggtactataaatattaaaacaaataaataaaattccaccggatgttaacagaaaaagaaaaaaagatacaagatttctctctccagtaacttgcggttacttcttctgtaattgttacccttgtctaaataacattctaaaattggtctgctcctgagcccgggcaagtacaagttggttcatccaataaatatcttcatgaaaaggtacatcaaaacattttaaaaagctattaaaaattaaacgatgccatcaactcttcagttatccacaggacaatcacatgtgacccagcatcagcagctattgatcaagatatattgaacgaatgaatgaatctttgtaggcatttttaaatcccgggcctgttgctccttgcacagtgccatgttcagccttccatcactgcctcaccagggtgcacacaaggaatrtaaatttcaatataattaggatataattagagaagcaaatctgatgcaggtttacatactaatcccaaagattagaattacstatactactactctccaaggttaactctgtggaagaggcaccgcagcatgcaacatcacataaagaaaactgacacttcctgagcaaatagttttcgtccatatcacttattcccatccattcctttaatacatgactattcctgatccagttaatttgaagaattcagtctcctctccataaaggctgatttcacaactacagtttctcaaattcctctctccccaaaaaggggtgcacttacggacttcgcttaagaaaacaccaacaataaacggcagaaggtatagtgttcggatctttgccatctccaccagtacccagccttcgccattacaccctgaagcggtctgttagaaaggtgaactaatttactctgcacgcacttgtccatggctgtcaacctccgcagccccttctacacttccaagtcggccaccaactccgcctcagtgagcccaggcccgccacctgcgccggccccacccggggcaccggctgcccgctctccctcgcaggccctgtaggctccgcacgcccctccgcacaggacacctcggggccagccccggcccggccacagcccattcttcctccaaactccataagcctccgctagcccagcccgagctccccgccgcgcccggctctctcctgggctgccgagtggaagaggccaggcggccaggacgggtcccgacctgcccaggcctgcgacaccccccgcccggcggagaaaccgtcccagcggctgctgccccgggagccctcggaagcccccggactagcaggagcccggaggccggggttgcaggcgccagggcctactcaccgggagctggctaagcgtgggagccgacgtgcgccccggcctgaggagtgggacgcggccacggcgcgcggccctacaccgggacctcgttcggcgcggcgagtcggacgctcactccagccgccgccgccgccgcggctgctgcttcgccaccttggccgccatcttgactcaacccctctccctccccccagcccgcggagccgcggctaaggcggctccagcgccggctcctcctccttccggagagttgggagaccaactccctccgctggccgggcgcctctcctacctcggcggagcttcccgggtcgcgctgcgcccggtctcttcatgtctcctctaggcctggcagcggcggtcctctcggacggatacagggccgagcagcgcccagccggatccagcgctgctgccatcgtgccctgggcttgtgcgccccccgcctgcccgtctgttccgcgcgcccgaggccttcctcaggcgtgggaaaaggaaaaactccaggccgtggaagggaccctgcaaacccctccgcggcgtggtggggcggcggcggcctcctctggccggagctgcgtacagggaagccggtcccctcgtggctgggagctggaggggtgcatttcgacctgcccaagatactttctagggctctggctggaattcgcaccaagccctcactgaaatgctgggcgaggccgatttgtccacgatgttgctccttaaccttaagttacttgcaagaggagcctgtggccctcgcgactgttaagtgcacgctcagcctcaccctgctggggaaacgacggttcctcgtaaccgcacgcatacgttcctttagaaaagccaggcccgaccggacgcagtgggtcacgcttgtaatcccagcacttagggaggccgaggcgggccatcacttaaggtcaggagttcgagaccagcctgacgaacatggagaaaccccgtcactactaaaaatacaaaaattaagcgggcgtggtggcgcgcgccagtaatcccagctactggggagaccgaagtgggagaattgcttgaacgcgggaggctgaggtagcagcgaacctaggtcgcgccactgcactccagcctgggcgacggagccagaccgtttcaaaaaaaaaaaagaaagggccgggcgcggtggctcaggcctgtaatcccagcactttgggaggccgaggcgagcggatcacgaagtcaggagttcgagaccagcctagttaacatggtgaaaccccctctctactaaaaatacaaaaattagctgggcgtggtggcgcgcgcctatagtcccagctactcgggaggctgaggcagaagagtcgcttgaacccgggagacagaggttgcagtgagccgagatcgctccactgcactccagcctgggcgacagagcctctcaaaaaaaaaaaaaaaaggtaaagaaagccatccaaaagtgagaaggaataacaaagttggtgtaactggctattttggaaaactgtcatacggataacgggctgtctaaccctataattacgagaaaggcccgagttttaagaaatgaattcgaaaatgaagaggaaggaactcttcctataagtgggagcttatatataagacgcttccttttaaaccgattgtacagtgtggtaggactagggtaggaaactggacggcatggagacttctgtgttaaaacacaagagaacccttaacgttaaaacctcaagcttccggagcatgtcggcgggagggacttaacagcggaacccaacattccccggtgaagttttccagccggagtcagggtcagaggcagcctttcctactgcgcaggctcagtgctgcttacccatcatggaagcaatgtggctcctgtgtgtggcgttggcggtcttggcatggggcttcctctgggtttgggactcctcagaacgaatgaagagtcgggagcagggaggacggctgggagccgaaagccggaccctgctggtcatagcgcaccctgacgatgaagccatgttttttgctcccacagtgctaggcttggcccgcctaaggcactgggtgtacctgctttgcttctctgcaggtaggaggccataggaggggcgatgggagccggggctttgaaagggatttaagtgctaaccgatctcagtcgccttcttctcgaagttttccgtagggagctaagtgaatacaccgaaggtcttacctctgaacccctcacagcctagggacaggagcggccggcttacctggtgggttgggggacgtcggcagctcgcgtactacgccagcaggattgaggagcagagaaacagttgcagttggttgtattcagtacctgcatttccgttgggaactccacctgtacttgttattctgtggaacttttttttatttgtagaaggagcaagaatattgaccttactatatagcacacgaaacaatctatgctgtatcgtgcctgctcaatccttaaagttaacttctaatgatagtaaaagaccttcctgctgcctttaaaatgcagcttgtgctagtaacatgcatgtgtcaaattgaagaattagacatagatgactagatagaaagtaattttgtaggtaattttagagttcaactccacccagctttcagtgaaggaacctttcaaataatagatttttgcttaccatagagaaaagatcaaatgacaaagcaaatattgaccattaagctggaatatggtgataattgaacagttgtataaatgaagtaattgaattgtacacatacaatgggtgaattttatggcatgtcaaagtatacctcaataaagctatttttttaaattgcccatgacctcttttcccatttgtttgtgtgtctttccaattctttttctatacagcttcttcacagaaatcacattttataaaattttatatcgtttttactcgacattactttttcatttatttaccaaatacttattaaacatttatgtgctaggccttattctatgccctagggatacaaaagtggaaagctagataagagcagtgtcctcatgaaactttaaacatctacctatattaattagatctaaatgtatagcctgttaaatggcttcatcgggataaaccttaatcatcccttattgtttgtacattcagagggttttttcctagtttattgcaaagagcagagaacatctttatgtattttatattatttcatgagtattaatttttaaaattggctgtttttaggctttgcattgcaaaacacattcccaaaaacaaaatgccaacttactctttttttttttttttttttctgagatagtctcgctctgttgcccaggctggagtgccgtggcgtgatctcggctcactgcaacctccaccacccgggttcaagtgattctcctgcgtcagcctgccaagtagctgggtttacaagcgcatgccaccacacctggctaatttttgtatttttagtagagatgaggtttcaccatgttagccaggctggtctcaaactcctgacctctagtgatccacctgccttggcctcccaaagtgcttgggattacaagtgtgagccaccatgcctggcctacctatttacattcttactggcactaatgagagtatctgtcttaatatactactttctgtagcattgactgacattttttataaatttctttttttttttttttttgagacggagtcttgctctatcgcctaggctggagtgcagtggcgcaatctcggctcactgtaagttctgcctcctgggttcacgcccttctttctgggactacaggcgcccgcccgccaccatgcccagctaatttttttatttgtttttagtttttagtagagacggggtttcactgtgttagccaggatggtcttgatctcctgaacttttgatctgcccgcctcagcctcccaaagtgctgggattacaggcgtaagccaccacacctggccattttttataaatttcttaatttgtttagtatcttctcccccaaaaacctttgttaccagtaaaagtaaaccattttacatatttattaagaattggagcccaagcacttttcttctaaaatttatgctctgttaagaatattaattgcaaatagttacaagtaatgccaccattttttcttagcttctaggtttggtggggggttttttgtttagttttctttttgagatggagtctcactctgtcacccaggctggagtgcaggggcgcaatctcagttcactgcaacctacgcctcctgagtttaagcaattctcttacctcagcctctcgagtagctgggactacagtgtgcaccacatgttgggctaatttttgtatttttggtagagctgaggttttgctgggatagccaggctagtctcgaactcctgacaagtgatccacccacctcggcctcccaaagtgctgggattacaggtgtgagccaccacacccggctggccagcttttagttgtatttgtattttatattacaactataggagtcaaattataagcaaatttgttacaaggtcttcaaaagaagcctggattttatttgcaaaacattataggtatagctgtttaataaacttacccttattttcaataggttcataaaaatttgggaccagaattgaaaattttttcaaataaaaaatataggccgggcatggtggctcatgcctgtaatccgagcactttgggaggccgaggcgggcagatcatgaggtcaagagatcaaaaccatcttggccaacatgttgaaaccccgtctctcctacaaatacaaaaattagctggctgtggtggtccacgcctgtagtcccagctactcgggaggctgaggcaggagaatcacttgaacccrggaggcggaggttacagtgagctgagatcgcgccactgcactccagcctggcaacagagggagactccgtctcaaaaaatatatatagagagagagagcatgcacttggcactcaatgtttttattgtatttcattatttcctctgaatccattttgttttttattgtatgttatttattctttatttgtgtttttttaaattgttatttwttttttttttttttttttttttgaggcagagtctcaccctgtctctcaggctagagtgcagtggttcgatcttgrctcactgcaacatctgcctcccrggttcaagcgattttcctgcctcagcctctggagtagcgggattacaggcattcaccgccacgcccagccaattttgtatttttagtagagacgggctttctccatgttggtcaggctggtctcaaaactcccgacctcaggtgatccgcccaccttggcctcccaaagtgctgggattacaggcgtgagccaccgcgcccagccacgccaggctaatgtttgtattttcagtagagacagggtttcaccatggcggccaaactggtctcgaactcctgacctcaggtgatccacctggcccggcctcccaaagtgctgggattacatgcatgagccactgagcatggcctgtttgtttattttataaaaatggggtcttgttctgtctagagcctttcccctctagactgcactgtcagctctcatatcaggtgacagagcaagaccctgtctttataaaataaaccaaacatgaataacatacaagaaaaaacaaaatgataagttggattcagaggaaataatgaaagacaataaaaacattgagtgccaagtgcatgctctgtattttttatttgaaaaaattttcaattctggtcccaaatttttatgaacctattgaaaataaggatgaatttattaaagagctgtacctgtaatattttgcaaataaaatccaggcttctcttgaaaatcttgaaacaaacttgcttaatttgactcctatagttgcaatataaaatataaataaaactaaaagctgactggatcacagctccctacagcctccaagtcttgggctcaagtgatcctcccgcctcagcctaccaatagttgagactataggcgtgtgccagcacacccaacttttttttttttttttttgagacggagtctcactgtcgcccgggctggagtgcaatggcgcaatcttgggtcactgcaacctctgcctcctggattcaagcaattctcctgcctcagcctcccaagtagctgggactacaggcatgcatcaccatacctggctaatttttgtttttgtttttgttttgttttgagtctagctstgtctcccaggctggagtgcagtggcacaatctcggctcactgcaacctccgcctcctgggttcaagtgattctcctgcctcagcctcccaagtagctgggattacaggtgcccgccactatgcccagctaattttttgtgtttttagtagagacagggtttcaccatgttggctgggctgctcttgaactcctgacctcgtgattcgccyacctcggcctcccagaatgctgggattacagacgtgagccaccacgcctggccaatttttgcatttttaatggagatagggtttcaccttgttggccaggctggtcttgaactcctcaagtgatccacctgccttggcctcccaaaataataggattacagcatgagccactgctcctggtctaatttttaaaatcccttcttaaattcacaagtcattcaaacgtgtggattaaacattatctattctgctgatttaacattttaatataaaaaacaggaagctattaatttgtaatgtaatgaaagctatgatgttttgatggagaaagtactatggacacaaaatggaaaaaagcattaaatctcttttcaggggtttagattaaggaaatctccaaattggttttcttttgagctggactttaaaaataggagtagatatatatataggaagcaagcagtagtaaaggcatcagtaactcttggatttgcatgaataattcattctaacaagatcttcagtttaagggaaagggagaagcagggaaaaaataataattgctttgttattggtggctcatttcatcctgtcagcaactctgtgaggtaggtactattgttttttccattatacaagtatgggaactgaatcacaaagtttaagtaacaactgaagtgaccagctacagtgtaaagaagccaggaccctgtggtttttctctgttctaaaaccgttacacccaatctgcctctcacattgccttgtatgccttgtcagttgatgaaatatctaaattgattcccagtgtatgttccaaggaacattagttcatcaagctgctattaaaaaaaaaaaaaaagaggccaggcacagtagcttacaccagtaatcccagcactttgggaggccgagacaggtgcatcacgtgaggtcaggagttccagaccagcctggccagcttggtgaaaccccatttctactaaaaatacaaaaattagccaggtgtggtggtgcatgcctgtaatcccagctactctggaggctgagacaggagaatcgcttgaacccagtaggtggagattgcagtgagcagagattgtgccattgcaatccagcctgggcaatagagcaagactctgactcagaaaaaataaataaataaaatgaaaagaatgcctcggtcaagtttggagaatagccagatgtgctatcctctatgtagacgtttacagtctttatgagaatatcaacatctttgagaagcattgctgtaaaaaattttgacttggtttaatccagtattcctccaatttatgtgaccactaaaatacctactaatagatgcatctcttatatagtaggatgtcattgaatatatatggtagagaagtaacataatcagttttgtgttttagaaagctcattcttggccaggcgcagtggctcgtgcctgtaaccccagaactttgggaggccaaggtgggcagatcacaaggtcaggagttcgagaccagcctggcaaacacggcgaaaccccatctctactaaaaatacaaaaattagccgggtgtggtggtggatgcctgtaatcccagctactcaggaggctgaggcagaagaattgcttgaacccaggaggtggaggttgcagtgagccaagatcgctccactgcacttcagcctgagcgacagagctagactctatctcaaaaataaaagctcagtcttggaccgggtgtggtggctcatgcctgtaatcccagtactttgggaggccaaagtgggaggattgcttgaggccaggagttcaagaccaacctggtcaacatagtgagaccccatctatttaaaaaagaaaaaaaaaaaagaaagctcattctggtggcaatggggagaatggtttggaaggaaagattggagtcaggaaaatcaattcagcccagcctttcttctctagactgcactgccagctctcatatatcagatttccatgtaattctggtctatacactttagtcatctcmacaaccctgtcttaattactgtagcttataaaagctacactaggccagaagtgttggttcacgcctgtaatcccagcactttgggagacagagacgggtggatcactagttcaagagagcaggaccatcttggccaacgtggtgaaaccctgtctctactaaaaatacaaaaattagctgggcatggtgatgtgcgcctgtagtcccagctactcaggaggctgaggcaggagaatcacttgaacctgggaggcggaggttgcagtgagccaagattgcgccactgcactccagcctcttgctcttgcgacagagcaagactccgtctcagggggaaaagaaagctacactatattatagaagcgctattatctgatatgaatagtcttctgattgttcttcagggtatgtttgctgtttttgaccctttttccaaataccttttttatgggggaagacagagcctcactgttgcacaatcttggctcactgtagcctccgcctcctggattcaagtgatccccctgcttcagcctcccgagtagctgggactacaggcatgcaccaccacgcccagctaatttttgtatttttagtagagacgggattttgccatgttggccaggctggtctccaactcttgacctcaggtgatccaatccttcttggcctcccaaagtgctgggattacaggatgagccaccatgcccagcccccaaatacattttagaattagcttggtgatgttcaaggaaaaatcttgctgacattttttcccccttgtgacagagtctcactctgacgtccaggctggagtgcagtggcgcagtctcggctcactgcaacctccacctcccaggttcaagcgattctcctgcctcagcctcccaaatagctgggactacgggcatgtgccaccatgcccggctaattttttgtatttttagcagaaatagggtttcaccgtgttagccaggatggtctcgatctcctgacctcgtgatccgcccacctcagcctcccaaagtgctgggattacaggcgtgagccacagtgcgtggcccttgctggcatttttattggaatttcactgactctactgattaatataaggagaactgacatttccaatataaagcctttctgtctctgatactatggtatgcttccatttattatatgttggccttctttactatctgttaatagttttataattaaggtcttaaatgtgtattgagatgattatgtcattgtgtccattaatctgttcttatgtgtagacattccttttgcaaatatagtctgttactttctcatacttcagtatcctctttaatttctttaaatatattaaacatttatatctgcttctaataattccagtttctgcagtctgtatatctgattctgttctttgttctagtaattcattcggggtgactcggttccatgtgtattttgtgatttttttaaatgtaagcacgttkctttttttttttttttttttttttgatacggagtctagctctgttgcccaggctgaagtgcagtggcacaatctcagctcactgcaagctccgcctcctgggttcacgccattctcctgcctcagcctcctgagtagctgggactacagtcacctgccaccatgcccggctaattttttttttttttttcagtagagatggggtttcacacctgggattacaggcgtgagccaccgtgcctggccttttgttttcttttgttgttgttgttgttttgttttttgcacgtgtttcttagaaccatatttgtggtaatattttggtgatttactttagcttcagccaggtagctaagggcactacctacctctcatcactctaaaattttagattgagatttttcaggccatagaggtcatataaattcagggatcaaacccaagagcattcabtgtggaatgctgtgaaacaaattgtctcaagaccttgtagcttaaaaccataattaaatctttccagcctgtgtgctggcacacacctataatcctggcactttctgaggccgaagcaggaggatcacttaacccaagagttcagcctgggcaacatagccagaccaggaaaaaaaaaaaaaaaaagttagccaggcttggtggcagctgcatgtagtctcagctacttgggaggctgaggtggaagaacacttgagcccaggagtttgcgactagagtaagctatgatgatcatgccttatagactaagcccatgtctcaaaaacaaacaacaacaagaaaaaccaatcaccttttttttcatggtttcagacaaagtatacttgtctctgcctcacaatgtttagtacctcatttggaggacccaaagactaggggctggaatcacctgaatactcatgcacttacgtatctggctgtcagctggggactttgctacagatgtcagccagaacatccacatatggtatatccatgtgacctgggcttcctcacaacctggtggctgggttcttgggcaagtgtcctaagaaagagcctgtgctagggataaccatatttccttttatgacctatccttaaaaatcttgcagtatcataagccacatccaggtttaaggagagaattagattccacctcctaaaggggaatgtagacattctacaagtgcatatgggactagaaatattgctgtagctacttttggaaaatacagtctatcacaccaagtaaaggagagtatgtgattagcaattcttagggggtgacattttttcttattttcccttctgctagaaccaagcctacagataggatgtagccccaccatatctgtctagggcaagtttttttctggttcatccagtgaaggtattgccttttgaaggtcctgtctttatgtggaggtctccttatctgtgtccaagctttatctgctgctcccttgactttaggccaccaaggatatgtagatgttctcaaagtgctctgggtcagccgcataatacctctcaggatttatgtctacctattgttttagtccttcaagtatatcccttactttcctgctagttaaaccatgcattctagaacatgtttgccttttatctcacatgttcaggtattcatcctgagggtttctctgcatatctgatttaccatattgcctaaatagaacttattaggggttatttttaatactgcttttttgggttttttcttttttttttttgagacggagtctccctctgtcacccaggctggagtgcagtggcacgatctcggctcactgcaacctccacctctcgggttcaagtgactctcctgcctcagcttcccaagtagctgggattacaggcgcgtgccaccatcatgaccagctaattttggtatttttgtagagccagggtttcaccatgttggccaggctagtctcaaactcctgacctcaagtaatccgcctgccttggcctcccaaagtgctgggattacaggcgtgagccacctcacccagtgaaaggtagcaatttcattagtaagagtcgatatgaatgcaatccttttgggaataatgagaaatgacactactcgcaagtatggctatattggctgataatatagcatgtgacaatgtttcttgatctgcagagatatgagctcatttttctttttaattttcttttctttttttttttttttttttgagatggagtttcactcttgttgcccaggctggagtacaatggcatgatctcggctcactgcaacctctgcctcccaggttcaagcgattttcctgcctcagcctcccaagtagctgtgattacaggcatgtgccaccatgcccggctaattttgtatttttagtaaagactgggtttctccatgttggtcaggctggtctcgaactcccracctcaggtgatccacccaccttggccccccaaagtttgggattacaggcatgagccactgcacccagcctttytaatttttttctcttagtgatcttttaaagacaacttctgttttatagggataacgcctataatcccagcaatttcataattgaaagattttattcattgaaaatccagtttttaatattatttaaattgtggtaagacatacataacaagaacttaccattttaaacttttttttttttttttttgagatggagtttcactcttgttgcccacactagagtgcaatggcatgatctcggctcactgcaacctccgcctcccaggttcaagcaattctcctacctcagccccctgaatagctgggattacaggcacccaccaccaccatgcccggctaatttttttatatttttattagagaatggagtttcaccatgttggccaggcttgtcttgaactcctgacctgaggtgatccaccttcctcggcctcccaaagtgctaggattacaggcgtgagccactgcgcccagcgattttattttattttatttctttatttattttattttatttttttgagacggagtcttgctctgtcgcccaggctggagtgcagtggcgcgatgtacgctcactgcaagctccgcctcccgggtttacttacaccattctcctgcctcagcctcccgagtagctgggactacaggctcccgccaccacgcccggctaattttttgtatttttagtagagacggggtttcaccgtgttagccaggatggtctcgatytcctgacctcgtgatccgcccgccttggcctcccaaagtgrtgggattacaggcgtaagccaccacgcccggcgattttaaacatttttaagtgttcaattccatggcagtaagcactttcatagtattatgtaaccatcaccactatttcatcatcccaaatagaaactctatacctgtttagcattccttttcccctcctctcccaagcctctggtaaccaccattctttctatctctatgaatttgtctattctaggtaactcgaataagtggaatcatacaataattgttattttatgcctggcttatgctaattagcatactgttttcaaagttcatccatattgtggcatgtatcagaacttcatttctggttgagctcagtggctcacacctgtaatcccagcactttgggaggctgaagtggaaggatcccttgagaccaggagttcaagaccagtctggacaacatagtgagatttcgtctttacaaaaaataaaaataaaaaaattagccagtctgggtggcgagtgcctatagtcccagctacttgggaggctgaagtgggagaatcccttgaatccaggaggtcaaggctgcagtaagctctgatcagtctgctgcattccggcctgggtgacagagcaagtccctgtctcaaaaaaaaacttcatttctttttatggctttattaatattccattgtgtatatatacatacatatatatatgtatgtatatataccacattttgtttatcattcatctaatgataggcacttgggttatttccaatttggggctattatgaataatgcttctatgaacattggtgtacaagtatttatttgagtaccggttttccttttttttttttttttttgagtataattgctgagacatatggtaattctgtatttaaattttttgagaattgacaaactgttttctgcagcaactgtacagttttacgttgccaccagcaatgaactatggttccagtttctccacatctttgtcagcatttgtaattttccattttttggactatagccatcctagtaagtgtgcagtgatgatgtcacattgtggttttgattttcatttccctratgactaaggatgatgagcatcttgcatcttttcacatgcttattggccatctatatatcttctttagagaatacctattcaagtcctttgcccattttctgattctagtttcattttaaagtcatgatttttttttttttttttttttttttgagacggagtctcgctctgtcaccaggctggagtgcagtggcacgatctcagctcactgcaacctccacctcctaggttcaagagattctcctgccttaacctcccgagtagctgrgactacaggcgtgtgcccaccatgcccagctaattattgtatttttagtagagatggggtttcactatgttggccaggatggtctcaatctcttgacctcgtgatccacctgcctcggcctctcaaagtgctgggattacaggcatgaggcactgtgcctggccaagtcatgatttcttagactgggttctgtggacacatcctaatagaagaggatctagctctcttagtttcagcttcctttgggaacccaggcctctgggctccagtaacactgcctccttcctttaccttgccaaccgagggttggtagtcacttcttgctatctctaaactctgggttacttcactgttccttttgtcccttagatcctccctcagttatgcgtcaaaatctttgcattaaattcttgctgttgtaactatttgatgtggtttctgttaccccgaatagatcttgacatagcatctaaattccctcattttataggggaagaaacttgtaccattttgtcttccaaatacattttagaattacttggtcatgttaaaggaaaaacattgcagctattccttcccataacatacttctcagtcgtaactagcaatctagcagtcataatcacttttttttttttttgagatggagtctcactctgttaccaggctggagtgcagtggcacagtctcagctcactgcaacttctacttcctgggttcaagcttttctcctgcctcagcctcccaagtaattacaggctaggattacaggcctgagccaccgtggccagcctcataatcacatttaatacaaaataaagtcacgttgtaaagactcaaatttatacatcacaatgtataaaggtaaaaattttatttttaaagaataaaattacaaaaattaaagaatttctccaaattcatatagttagtaaaaagacagatagtgttgggaccatgatgccttcatgcccagtccatttcttgttctaacaaattaaaacttcccgggttggagtgggagaggagcttttttcctttatatggttttttttttggttttggtttttcttttttttttttttttttttggtagagagaggtcttgctatattccccagcctggtcttgaattcctggccttaaacagtgtgcccgccttccaaagtgctaggagctgggattacaggcatgagccaccacacccagcttcttactgatttattttcttttcttttttttttttttttttgagacacagggtctcacattgtcacccaggctgtagtgcagtggtgtggtcatggttcactatagcctcaaaatcccaggctcaagcgttcctcccacttcagcctcccgagtcagtgggactacaggcgtgagccaccatgcccagctaatttttaaaatttttcttttgtgaaaacagggtctcactatgttgaccaggctggttttgaactcctggcctcaagtgatcctcttgccacagccttccaaagtgctgggaatacagacatgagccactatgcccagctttgatttttttttaaccatataaatctattacctatttagaataaactaattttaaattttttaagtaaaataaaatgtttacccttataaattatgatgtataaatttgagtctttacaaaatgtctttactttgtattaaatgtgattatgattgctagttatgactgagaagtatgttatgggaagactactaagcatacaattgtgcatgagcttatacacaaacacacacataatgtagttctacatctagaaattacattaattttattattttctgtttcctagaataatggtctcaaactctttggtcacattttcctatcagtaaaaaatgttgagtttttttatttatttacaatatatcataagtatatggactaatgtgtacattaaaaacattaacaaaaacttacatttataaaaaacaaggtaaacaaattagggggagatggctgagcactgtggctcactcctgtaatcccttcactttgggaggcagaggtgggtggatcacctgaggtcaggagttcaagaccagcctggccaacataatgaaatcccgtctctactaaaaatacaaaaattagccaggcgtggtggtgggcacctgtaaacccagctacttaggaggctgaggcaagagaatcgcttgcacctgagaggcggaggttgcagtgaactgagatcacaccactgcactccagcctgggcaacaagagcaaaactctgtctcagaaaaaaggaaagaaaagaaaattagggggagacatcctaatgctttttctccaccaccccaaaagattattttgtgcatcctagggtgcacctgtcttagttggacattgttctagaatgtatcagttaaaagctgctgaaagatctcagacatgtgttctgttaagtgcctacaggttcaccaaacttattgaaaatagttaaaatggtccttgacttcagcttccagaactgttgtaagttccttagttcaaacacaaagcaataaaactggccccaataaaacacattagcctcaattctaagcagtttctgataaccataatcatagactaatgtgcacagcctttgaacttagcaattgcaacactaatgtacatgagactatttatcaccaaaaatcaagtaatctagggagaaaaaatgggagagggtatgtgtagagatttgagggaaacccaaaatatacacaaaatagtttatgacttaaaaaaaaaaaaaacgcaaaaaaaggtatgatgaggacaatacaaaactaaacctgtaaactaaacctgtttgctgggcgcagtggctcacacttgtaatcccagcactttgggaggctgaggcggatggatcacaaggtcaggagttcaagaccagcctgtccaacatggtgaaaccccatctcaaataaaaatacaaaaattagccsggtgtggtggcgggtgcctgtaatcctaactactgagctgaggcaggagaatcgcttgaactctggaggcagaggttgcagtgagccaagatcgcgctgctgtactccagccagggcgacagagcaagactcttaaaaaaaaaaaaaaatggccattatctccacttaactggtgaagaaactgtggctcaagaaagttaagtaacttgcacaaatcagacctgcaattatttattggagagttgaagtaacaggtgcattagctggacagttgctcaaaatgagtccaacttaagtgataccaaaatgtcactgtattattatttgtaaggttacagaggagttttatttaccagaactatttttagggaatatagtatatgttttgggaaaataaagaatatataagttgtttggggtgccaatgggatcaagatccccttggggtatgctggatagctggctatgaaactcttcaaaagaggaagctttcctaaatggtatctacacattttcctgtaatactcaggagtagcaacctctattttctttttctataccaacaagaatgagcttggaaagcttcatccttaaatcaatgttaaacaggatttgaggactgtcaatgaagagggggccccagttgttctgagtggtcgtacatggtgtgatcctaaatctgcttaacttcaaagttagtacccttggctgtgtaccatgctgcctctagcatgtgactgaaatgcagacagacagataggtatatagatacaaagatgggaaagaattgtgaatggtgattctaaagattgtgctactggtagtcttctcacaggagtatcttggtgtcgtgttttcttaaactttgtatcataatcacacattttcaggcagcttaaatcctttaaggaacaaaaacaggataagaatgagtgaatagataggtctccactgttaaaaaaaaaaaatctaccactgtatatttgttaccctcaggaaattactacaatcaaggagagactcgtaagaaagaacttttgcagagctgtgatgttttggggattccactctccagtgtaatgattattgacaacaggtaatatatcttttaacaatgtagaaatttattggcaataaatatgcagtgatatactcaaaagacacacaaaaaactaatgtgagtggctgagaacatcttgtatgaaaagtctagggctcggtgccatggttcacgcttgtaatcccagtactttgggaggccgaggtgggcggtctcaggagtttgagaccagcctggccaacatggtaaaaccgcatctctactaaaaatacaaaaattagctgggcattgtggtccagctactaaagaggctgaggcaggagaatcacttgaacccaggagttggaggttgcagtgagctgagatcaagccattgcactccatcctgggcgacagtgagacttcatctcaaaaaagaaaagaaaagtctacataaaataacttcacagcggggcacagtggcttacgcctgtaatcccagcactttgggaggccgaggtgggcagatcacctcaggtcaggagttcaagaccaacctggccaaacatggtaaaaccccgcatctactaaaactacaaaaattagccgggcgtattggcctacgcctgtaatctcagctacttgggaagctgaggcaggagaatcgcttgaacctgggaggcagaggttgcagtgagccaagatcacaccattgcacttcagcctggatgagagagcaagactccgtctcaaaaataataataataataacttcacatttgtttttaaatgacagcgtgattgaaataaattttttaacttctgttcggattttttttcctgacatgggtacttctctttacatctatagctttaaaaagttttattataaatttcaaaaacatacaaaagtwtaaagaatagtatcayaaacccccatttgcctattacctaaacccactgattatcgagactttactatacagtgcttgtttcttcacctatccctaacttaacatcttttgtgtatatgaaacattttaaagaaaactccaaccaccaggttttttaccccaaggtacttaggtctgcatctcttaagaagatgggacacttttcatctagctacagacagccattatcattacatctaacaatattaacaataacagtaattctttggtgtccaccaacacccagtccatatcagaatttcttcaggtagctcaaagatttccttttacaattggtttactcaaatcaggatttcgacaaggaccacacattatagttggttgatattctgcatttaattacccttttctccaaatcagtggatttgttgaagaaactgaattatgttgtcatacagaatgtcctgcattctggatttatctgtttgtttcctgtatgtctacgttcttttttttttttttttttttttttttgagacggagtctcactctgttcccgcccagcctggagtgcagtggtgccatctcggctcactgcaacctccacctcctggattcaagcggttctcccccctcagtctcccaagtagttgagattacaggcatccaccaccacacctggctaattttttgtatttttagtagagatggggtttcaccatattggccaggccaggctgatcttgaactcccgacctcaggtgatccacctgcctcggcctcccaaagtgctgtgattatagccatgaaccactgtgtccggtctttttttttttttttttttgcacacggcaaatcagatttgggtctaactttttggggggcaagaatatttcataggctgtacyatgtactttgcatcatatcaggagacacgtactatctgttagacctatagtgaatctacagttgatcagtgagttcagatggcaatgactccctttattttaaagacccccatcaaactttcatatgttctcatgcctattgcctgaatcattaattacctagaagttgcaaaatgcttagtttccaatagtctcacatattctatgtgtactatctataattcttttgtaaaacagaatcttcactattaattaaggctacttagttaccctgctatgtataataatttgaaacaaaaaaacaggataggtgcttaattttttccccttaattgacatttttcagaataaagagttgatacgccgtacacctacagtcgtgatctattgtttgtttcttgaatgggaggacacctaactttcattaggaaattacgcgtttttatgtattcggtgtttcaggttcagtcatatgttctttaatactaaattgtcttatgtttggccagagagtctctccatgttggcttatatgtccttttcatatgacctctgtcttttatgatttccttcctttctttcaagtacaatgagattttccagtactatcttgtatactttcctgctccaattctgaaatcagccatttctccaaagagcctttgtttgtcttagtagggaatggtatttagagtccataaccagcatagtaggagtgttcattgcaatagtgttatttatttatttttttagacagagtcttgctctgttgcccaggctggagtgcagtggtgcgatcttggctcactgtagcctctgcctccctggttccagcgagtctcctgcctcagcctcctgggtagctgggattacaggtacacgccaccatgcccagctaatttttrtatttttagtagagacaggggtttcaccatgttggtcaggctggtctygaactcctgacctcaggtgacctgcctgcctcagcctcccaaagtgttgggattacaggcatgagccaccacgcctggccgctatagtgttattatttctcattgctacttgacctttatagtggacagagctaagatgtatgttttttatgtgcttttgtattttttagagacaggatctcactgttacccagggtggagtgaactggcgtgatcacacttcactgtagccttgaactcctgggttcaggcaatcctcctgtgtcagcctcccgagtaactgggactacaggcactcaccaccacacctggctttttttttttttttttttttttgagatggagtcttgctgtgtcgcccaggctggagtgcagtggtgccatctcagctcactgcaacgtccgccacctgagctaaagtgattctcctgcctcagcctcctgagtagctgggattacaggcacacaccactacacctggctaatttttgtatctttagtagagaaggggtttcgccatgttggccaggctggtcttgaacttttgacctcaagtgatccgccctcctcggcctcccaaagtgctgggattacagacgtgagccactgcgcctggcctatttttttttttaaaggaaaaaaatcagaaatatatacagatgattacaattcaaagttaatatttcaggggttttgtttaacgtcattgatatttacaatggaatctctggttgggtgtggtggctcctacctgtaatccaagcactttgggaggccgaggtggacagatcgcttgagcctaggaatttgagaccagcctgggcaacgtggtgaaaccccgtctctactaaaaatacaaaaattagctgggcatggtggcatgcccgaaatcccaactacttgggtgactgaggtgagaggatcacctgaacccagaaggtggaggctgcagtgagccaagatcatgcccactgaactccagcccggataacagagtgagatcctgtctcaaaagcaaaaaaaaaaaaaaaaaaaattgaatctcttttctgtcacactgaaagtcctttccaagaacatgaacataattacttattttcttctttaatcttttcaagaatttcagggccgggcgcattggctcacgcctgtaatcccagcacttggggaggccgaggtgggtggatcacgaggtcaggagttcgagaccagcctggccaacatggtgaaactccatctctactaaaaatacaaaaattagtggggtgtggaggcacgcgcctgtaatcccagatactcgggaggctgaggcaggagaattgcttgaacccaggagatggaggttgcagtgagccgagatcgcgccattgcactccagcctgggtgacaggatgagactccgtctcaaaaaaaaaaaaaaaaaagaatttaataaaacatgaaagaaggggctggtattatggtattatgtatactcaaaacagtaaatactcaaaactaatactaaatacaatatgactgattatgatgcctgcaatttactttaagataattcagaaaaaaataaatacctatatagattaaccccaaatgacaaaatataacaatttaaaccttagtggaaggtactggagtgtttctttttttcttttttttttttttttgagacggggtcttgctctgtcacccaggctgcagtgcagtggtgtgatctcagctcactgcaacctcctcctcctgtgttcaagccattctcctgcctcagcctcccgagtagctgggattacaggcgcccaccaccatgcccagctaatttttgtatttttagtaagacagggttgccaggcgccgtgactcacacctgtaatcccagcactttgggaggccgaggcaggaggatcatgaggtcaggagttcgagaccatcctgaccaaaatggtgaaaccccgtctctactaaaaataaaaaaattagccagatgtggtggtacgtgcctgtaatcccagctactcatgaggctgaggcaggagaactgcttgaacacaggaggtgaaggttgcagtgagctgagatcacgccgctgcactccagcctggtgcgacagagtgagaccccgtctcaaaaaaaaaaaaaaaaaaaagacggggtttcgccatgttggccaggttggtcttgaactcctgacctcagatgatccatccgccttggcctcccaaagtgctgggattacaggccggagccaccttgcccgacctgaaaatttagctaggtgtggtggcacgcaccctgtagtcctggatactcaggaggctgaggtaggaggattgcttgaggccagaagttcaaagccagcctaggcaacatggcagaaccctgtctctaaaaattaaaatgaaaaataaaaatgaattttgggccagccgggtggctcacgcctgtaatcccagcactttgggaggccgaggcaggcggatcaggaggtcaagggttcaagaccagcctggccaacatggtgaaaccccgtctctactaaagatacaaaaaattagccaggcgtggtggcatacacctgtaatcccagctacacaggaagctaaggcaggagaatcgcttgaacccaggaggcggaggttgcagtgagctgagatcgcaccactgcactccagcctgggtgacagagtgagactctgtctcaaaaaaataaaaaagaaaaaaaaaagaaaaagaaaaggcagtaaagtttaggtgagctgtgaacaaattagctttggcaaaacatatatctctttctgttgaaccttcatgatatcatacagaaatgtaaactgtgaatagtggagagagatgatgagttttgtgcttcagaatgattactctaatgaaagtatggattgaagagatcaagattgtagatgagtctattgtctttgtcccagtggagggaggatatctcaaattagggtagcagcaactgagatggagatgatgggatgaattcaactctttttttttttagagacaaggtgtcacgctgacacccaggctgtttaggcagtggtgcaatcttagctcactgcagccttgaactcctgagtagctgggactacaggtgtgggccaccatgcctggcttattttttaacttttcgtagagatgggttctccctgaattactcagtgatatgatttcgatctgtgtccccaccaaaatctcatgtggaactgtaatcctaacattggaggtggggcgttggatcagtaggaggtgattggatcatggaggcagatttctcatgaatagtttagcactatcctccttggtactgtccttgtcagtgagttctggcaagatctgcttgtttagaagtgtatagtacttcctccctctctctcttgctcctgcctctgccatgtaggatgcttgctccccctttgccttctgccatgattggaagcttcctgaggcctcctcaaaagtggaaactgctatgcttcctttatagcctgcagagccatgagccaattaaacctcttttccttataaattacccagtctcaggtatttctttatagcaatgtgagaaggaactaatgaacccaggctggtytggaactcctaggctcaagcaatcctcccacctcagcccctcaaagtgctgagattatggatgtgagccaccacgcgcagccccagccccaaggttttgttttcttttgtttttttcattttatttgagacagagttttgctctgtcacccaggatgaatgcagtgacacaatcacggctcactgcagcctaactcccgggtgcaagggatccttccacctcagcctcccgagtaactgggaccacaggcatgcaccaccttgccagctaccttttttttttttcggtagagatggagtcttgctagcttgcccaagcaggtcttgaactcctggactcaagcagtctcccactttggcctcccaaaatgctgagattagaggcgtgagccagcgcacctggcctccagtattatttaagaggtagaaataggccgggcatggtggctcacgcctctaatcccagcactttgggaggccgagggggtgggggcagatcacctgaggtcgggagttcgagaccagcctgaccaacatggagaaacccggtctctactaaaaatacaaaattagccgggtgtggtggcacatccctgtaatcccagctacttgggaggctgaggcaggagaatggcttgaacccaggaggcagaggttgcagtgagccgaaatcacgccattgcacttcagcctgggcaacaaaaacgaaactccctctcaaaaaaaaaaaaaaaaaaaaaagaagtggcaggaattcaacgaacaaaagaaatttgggataatggaaacccacctagatatctaggtggataaagattagcgagggtagtttgcaaaggaggagaattgggtatgaagagataataaattaggcatctttagcatatgggaggatgaaagtctttggggtgggctgggtgcagtggctcaggcctgtaattccagcactttgggaggctgaggtgggcggatcacctgaggtcaggagtttgagaccagcctgaccaacgtggagaaaccccatctctactaaaaatacaaaattagccgtgtgtggtggtgcatggaggctgaggcaggagaatcacttgaacctgggaggaggacggtgcagtgagccgagatcacaccactgcactccagaatgggcaacaagagtgaaactctgtcttaaaaaaaaaaaagaaaatctttggggtgaatgaaattgcccatggattaactggagtgataagaactggggatcagttagaggaaaataaaaccacaaactataatgaggagaattggaagcattgagatgtaaggtgggaatacttgagaaaattataaggaaaatgagaattatctgctcagtattaaacaaaattagcatcaaatggtataagaaatttggtaccctgctttttttactagagagtatttttagcatttttctatgtcattaaataatcattaaaagtctttaatgattgtaaagatttaatcgtgaagatgtaccataacatttaacattctcctactattgaatatttaaatctttctaatatttaagcacttacaatttttttagcaaatctctttgaagttctgactctttccataaatgaatttctagatattgaattactgggtcagagtataggactttttctttggggtttttttttgtttgtttttggagacaaggtctctgccatcaggctaaagtgcaatgacatgatcctgtctcactgcaaactctaacttctgggctcaagcaatcttcccacctcagcctcctaagtagctaggactacaggtgtgcaccaccatgcccagctaattttaaaaattattttagatccagagtcttgccatgtcacccaggctggtctccaacccttgggctcaagtgatctgcctcagcttcccaaagtgctgatattacagcatgagccaccattcccagtctatatagaactttttatagttttcttcatctaggtactaaacaattcttgttaaagttattttgattcttttttattattattgctgtgaaaaagattttttggttaagaatttactgctagtatgtagctttattgattttttaatgtatttattttatattcatcactttgaaacttctgtaaaaagcctaccagttttaacttgattccctaaagttttgtaggtaaatcatctgcaaataatgctaatacaatctttcatgttttcaacatatgcctcttatttctgattccttttttttttttttttttttttttttgagacagagtctcgcttgtaacacaatctctgcctcctgggttcaagtgattcttctgtctcagcctcctgagtagctgagattacaggcatacaccaccatacccggctaattttttgtttttttagtaaagatggggtttcaccatgttggtcaggctggtcttgaactcctgaccacaaatggtccacttcccaaagtgctgggattacaggcatgagccactgcgctcagccctgatccatttcttatttctttgagtggatttccttaatctatgttaaacaaaaaagggaaagcaggcaactttatccgtatttatgatttgattgacaacatatccagtgtttaaccattaactgtgttgtyactggtgtgtgtttgtttgtttgtttatgagacggagtcttgctctgttacccaggctggaatgcagtggtgcaatcttggctcacagcaacctccacctctcgggttcaagcaattctcctgcctcagcctcccaagtagctaggatcacaggcgtgtgccacccacccagctaatttttatatttttagtagagatagggtttcaccatgttggccaggctggtctcgaactgctgacctcaggggatccacctgcctcgaactcccaaagtgttgggattacaggcgtgagccaccgtttccggcctgctgattattctttataatattaggcattggtgggaattgatgttcactgtatttgatttggggtggggatcccattcatttcagtatgctacaaagagatgaaggaaaaagtttagatttattcttgatcttacttgcttcatggtaaactactggggtcaccacgggagaatttcttctgtttataccagtggatttatagagccagactgcccagactgaaacccaagtttaaagtttttaattgcgtaacctaggcaagttactgaattctgttcctaaatttcttcctccgtaaacctcgaaagatacatggttttgagttaatttgtgaaaggagttatgggttcctttgttttcaaagatgatatcccaccctcttactctgtgagtgttgtgatttgttttttcacattaatattgtaaccgcccaaggggttcaccttgcccactgcctagacagagccaatttatccagatggagagctgcaatggtgaaagagtaattcacgcagagctgcgggagaccagagttttactgttactcaaatctgtctccctgagcattcaggcagcagagtttttaagcataatgtggtgggtggggcgaagccagtgagctgattggtcagagacgaaatcatggggagtcgaaggtctcttcttgggctgagtcagttcctgggtgggggactacaagatcagatgagccagtttattgatctgggtgatccatcaagtgcagggtctgcaaaatatctcaagcactgatcttagcagtttagggagggttagaatcttgtgtcctccagctgcatgactcctaaaccataatttataatcttgggcctaactcgttagtcctacaaaggcaatctagtccccaggcaaggaggtctgctttgggaaagggctgttaccgtctttgtttaaactatgatctataaattaagtttctcccaaagttagttcatcctatgcccaggaatgaacaaggacagcttggaggttagaagcaagatggagtcagttaagttagatctctttcactgtctcagtcataattttgcaaaggcaatttcaatattagtaatcgtgttttttctcaggcactccatttgcacaatgtcctgcctgtgcagtgtctgctttggcccagtaatgcaaatgttttcggggacaaatctgttttggagatcttggttattaagatctttactctgatagaaagcaatgtgcattcagtacactcctcaacttgggatggggttacatttggataaacacctcctaagttgaaggtataaagcggggagtttttggtttttgttttttgcttttgagacagggtctcactctgtcacccaggttagagtgcagtggcaggatcatggcttactgcagcctccacctcccgggctcaagtgaccctcctgcctcagtctcccgagtagctgggactacaggcacacgtcaccacatctagctaatttttttggtaattattttagagacagggttttgccacgttgcataggctggttttgagctcctgagctcaagcaacccacccacctcagccttccaaagtgctgggattacaggtgtgagccatcacacccagactagagtgtgttttttgttgttcttgtttttttgagacggagtttcgctcttgttgcccaggctggagtgtaatggtgcaatctcggctcactgcaacctccacctcctggattcaagcaattttcctgcctcagcctcccaggaagctaggattacaggtgcccaccaccacgcccagctaatttttgtatttttagtagagacgaggtttcaccacrttggccaggatggtctcaatctcttgacctcgtgatccacccgcctcggcctctcaagaagctgggattacaggcgcctgccactatgcccagctaaatttttgtatttttagtagagacgggattttgccgtgttggccaggctggtcttgaagtcctgaactcagatgatccacctgcctcggccttccaaagtgctgggattacaagcatgagccactacacccggcctagagtgtgttttttacttatgatattttcaatttaggatgggtttattgggacgtagccagattgtaagccagggagwatatatatatatatatttgagayggagtcttgctctatcgccaggctggagtgcagtggctaattttttgtatttttagtagagacggggtttcaccatgttggccaggatggtctcgatctcttgacctcatgatctgcccgcctcagccctccaaaatgctgagattacaggtgtgagccactatgcctggcctatatatatatacacacatatatatatacacacacacatatatatacacacacatatatatatacatacacacacacatatatatatatatacacacacacacatatatatatatatattttttttttgagacggagtctcggagtctccctctgtcacccaggctggagtgcagtggcacaatctcagctcgcttcaagctctgcctcctgggttcacaccattctcccacctcagcctcccaagtagctgggactacaggcacccgccaccttgaccagctatttttatttttgtgtttttagtagagacggggtttcaccatgttagccaggatggtcttgatctactgaccttgtgatccacccgcctcggcctcccaaagtgctgggattacaggcgtgagccactgcgcccggtcatggcacctatattttttatatatcacatgaagaccatgtagcttcagcatcactcccctactcgtgaaatgctatagtagagggatagtaagcctattaaaagtaagtacttcaggccgggtgcggtggctcacacctgtaatcccagcactttgggaggcaggtggatcacgaggtcaagagatcgagaccatcctggccaacacggtgaaaccccgtctctactaaaaatacaaaaattagctgggcatggtggtgcacacctgtagtcccagctacttgggaggctgacgcaggagaatcgcttgaacccgggaagcggaggttgcactgagccgagattgcaccactgcactctagcctggcaacagagtgagactccgtctcaaaaaaaaaaagtaaatacttaaagaagccagtttgaagattcaagaaaaatgcatcttagtctgcttgggctcccttaacaaaataccgtagacagtgtggcttaaacaatagaaatttattttcccacatttctgcaggctagaagtccagatcaaggtcttttttttttttttttttttttttttttttttttttgagacggagtctcgctctgtcgcccaggccggactgcggactgcagtggcgcaatctcggctcactgcaagctctgcttcccgggttcacgccattctcctgcctcagcctcccgagtagctgggactacaggcgcccgccaccgcgcccggctaattttttttgtatttttttagtagagacggggtttcaccttgttagccaggatggtctcgatctcctgacctcatgatccacccgcctcggcctcccaaagtgctgggattacaggcgtgagccaccgcgcccggcccagatcaaggtcttgcagggtcactttcttatgaggactctcttcctggcttgcagatgaccttctcgctatgttctcacatgctggaaagagattctctcactctctccttcttccctccctcttcttaaaaggctacaagttttattggattaaagccccactcgtatgacctcatgtgatcttagttacctcctaaaaccctatctcaaaatagttacaattagtggttagggcttcagcacatgaatttgttgaggacactattcagttcatagtattccatcccagactcccacattcatgtccttatttcatgcaaaatacattcatcccatcctaacagcctccaaagtcttaactcattccagcattaactcgaaagtccaaagtctcatctaaatagcctcaccagctgtgaacctgtgaaaacagacaagttatatatttacaaaatataaggaatggagaggcataggatagatattttcattccaaaagggagaaatgggtgacaggccccaggcaaggccaaaacctaggaaggtaaactccattagatcttgaggcttgagaacaatcctctttgggcggatattcggccctccaagccctctggagcctgtggtgggaatggtagtccttctgatctctggataacttttgaggtcattcttcccttttcttgaaggacgacgcatgtttgcagccagatagctctgttgtctggtcctgtagactcttaagtccagcaggcttctttcgtcccacccgattttttctttctcctggctgttattgaggtggttgattacatgtgtggttcacacccatgctaatcacctcatcaaatggttgttcagtcacaccagagtgctctcttcagaacaagctttctctcttttttttttcttttggagatggagtctcactctgtcgcccaggctggagtacagtggcacgatctcagctcactgcaacctctgcctcctgggttcaagcgattctcctgcctcagcctcccaagtagccgggattacaggcgcgcaccaccacacctggctaatttttgtgtttttagtagagacggggtttcagcatgttggtcaggctggtcctgaactcctgacctcgtgatccaccagccttggcctcccaaagtgctgggattacaggcttgagccactgcgcccagcctcaagctttctcatttttttacaatatggacaggctgaaaattttccaaaacctttacgttctggttccttttaaacgtagcaatttcttctttatctctcaactcttacattttactataaacagtcaagaggacccaggccacaccttcaaaattttacttagaattcgcctcagctaaatatctaatttcatccttcagaagttctatcttccacaaaacactagaacacaatacaggcaggttctttgcttctttataatagtgatcaccttttctccattttccaatgtcttatctcatttttctctgagaccccatcagaatggccttaaagaccatatttccactgacattctgttcatgattgtttatgtattctctgagaagatggaggttttctctccagtctccttttcctttcctgagtcctcaccagaatcacctttaatgtccatatttctaccaaccattccttcctggcagtctaggatttttctagcattcacctcaaaactcctccaacctctacccattatctagttccaaagccacttgcacatttttatgtatctgttacttcacagtactaaaatctgtcttagtcagcttgggctgccaaaacaaaataccatagactgggtggcttaaacaacacaaatttattttctcagagtcctgcagactagaagtcccagatcaaggtctggcagggttggtttctggtaagggtcctcagcctgacttgcacatggctgccttctcactgtgcctcatgtggtggagggacagagggagacagatctcttccttttcttatagcaccaccagttctatcagattagggccccacatttatggatttatataacctcaattgcagtagtcctcccttatccacagttttgctttctgtggtttcggttacctgcagtcaactgtggtctaaaaatattaaatggaaattccagaaataaacaatttatacatttaaaatgtacaccattctggctgggcacagtgcactcacgcctgtaatcccagcaatttgggaggccgaggcaggtggatcacctgaggtcaggagttcaagaccagcctggtcaacatggtgaaaccctgtctctactaaaaatacaaaaattagctgggcatggtggcgcacgcctgtagtcccagctactcgggaggctgagacacaagaatcgcttgaatctggtaggaaacaagttgcagtgagccaagatcatgccgtcacactccagcctgggcaacagagcgacacaaagacaagaacaaaaacaaaacaaaacaaaacaaataggattatagatatatgagaggggatttattaggggagttggcccgtgattatggaggctgagaagtcccacaacaggccatctgcaagctggatgccagaagtatggctcagtccaaggccgagggcctgagaaacaagcaggccactggtataagccctagaatctaaaagccaaagagtctggagttctgatgtccaaagacaggagaagaagaatgtatcccagcttcaggagagaggaaatcacctttttgctccatgtgggtcccccactgattgtattgtgcctacctacattgatggcatgtcttcccctgtcagttccctgaatcacaggccagtatcctctggaaaccccctcataaaaatgcccagaaataatcctttaccagttctctagataatccttaatccagtcaagttgatacctaaattattattatttttgtgtgtgtgatggagtttcactcttgttgcccaggctggagtgcagtgacatgattttggctcactgcaacctccacctcttggattcaaatgattctgctgcctcagcctcccaagtcgctgggattaccgacatatgccaccatgtccggctaatttttgtatttttagtagagtcagggtttccccatgttggtcaggctggtctcgaactcctgacctcaggtgatccacctgcctcctttgtcttgcgaagtgctgggattacaggcatgagccaccatgcctggctgatacttaaaattaaccagcacacttactgtgtctaatttataaattaaacttcatcatagttaacatgtgtataagaaaaaacatagtatatatagggttcagtaccatctgctatttcaggtatccactggggatcttggaacatatcatccacaggtaaaaggaggctgctgtacctcctaaaaacctgcctccaaatacagtcacattttgggtttagggcttcaacctaacatgaatttggagggatcacagtttaatccatagcaacacgcaacagtcagtctttcagcctctcatctcctaacccagaaaaagcagagctttggaatcttactttagattatttagataagtcaaagagaagaatgaagaggaagaagagaaagagaagttttatagaggacctgtactcgtaacaataacagtaaatataaaactactactgtcagtgccaaaaaaataaatatatgatctttcttaatcctcaaaatagtctaattatttttcccatcttacagagacacagtgggaggttgagtaatttgctcaaggtcatccagctaataactggtagagctggcatttgagctgatgcaatctgggtgtacagtatatgcttcaaccactattttccacctactccatgcctgacacatgctttcacaaaggcagtctcatttaattcttagactaactgcacaagataggttttattttctttttttgtttcacaggaagaaactaaagctcagagagattaagagaatctttgtggtcacacgtttaataaatgacaatgtgaggattcaaaaacagaaagggagatggaatagattctgactttcttcagggaagcagatcaccactttgttactgtatttgaaagacgagctgggcacggtggcttgtgcatgtaatcctagcactttgggaggccgaggtgggaggatcacttgagcccaggatttcaagaccagcctgggcaacatagtgagaccccatctctacaaaaaataaaactaacctggtatggtggcgtgtgcctgtggtcccagctccttgggaggttgagatgggagaatcgcttggggtcaagaggtcaaggttgcagtgagccttgatcacgccattgcaccccagcctgggcaatggaacaagactctgtctcaaaaaaaaaaaaaaagaccaacgtgggtttatgagtacatttaattgacatcgtatagaatcagctctattttccccttgttctgaacttcactgcaaaacatttagccagaggagctcacccaagtaaatccctcaactaatcagttaaagaggggggaaaaaatctagttctcaagaaaagaaggcataatctcagttgtaagaccactatatggggacttttggcaactttacccagtaccttaacatctagtatgatgttaaaatgcatgctgcacagatgttaacagatacctattcagtacctagaatgacactgtgctagatgctgaagaaagagaaaagcagtgaaaggtataggaaatgaataataggttttgccatgacagtcattgctgttgcatttgtggacagctatttcattatgcatgtattgaaggtcaggcctagagaggagattagagaccctttccagaatacttgggaacggtatgtgattgagaaatgcagccaacagatttggtattcatttgttgcttttgtgcttcttaacatattatgaagaatctatagaattattttatttatatttagaaaaacaaaaacacgaatttctctatgcgcagataatttttttttcctttttttttttttctttttttttgttgagacagagtctcgctctgtcgccaggctggagtgcagtggtgcaatctcggctcactgcgacctccacctcccaggttcaagcgatgctcctgcctcagcctcccgagtaggtgggattacaggcacatgccaacacgcctagctaatttttgtatttttattagagacggtgtttcaccatgttggccaggatggtctcgatctcttgacctcgtggtccacccgccttggcctcccaaactgttgggattacaggtgtgagccaccccacccggcctcttttccttttttaaatagaactaagacaagacttaggtagtatgcacagataatttctaaaaggatagataccaaactctttaacagtagctgctacttagttggagccagggaagagagataatcactttctaattccacatgaatctgtgtaggttttttttagtaagcctttattactttaaaagttatatacatataattatataattatatgtatataatttttaaaacatatatataatttaaaagactatcctacacaactaataaaactttcctccctctctactcaacttctagccatccaagtgaatgctagattacaaataattctgtgtacattttgataatattttatttgataagttcaaagcatagaacagagttcctttaaaagataacaatgcatttaaacctttttataaacactgtagtcttctcatgggcttctttctggaggatgaatggggagtaacccagggacaccactcctaagtgcttagactagaaatggtggggagtcagaaaagaactgtttatggtgraataaaacaaagaaggctgggcgtggtggcttattcctgtaatcccagcactttgggaggccgaggtgggcggatgacctgaagtcaggagttcaaggccagcctgaccaacatagagaaaccgcatttctactaaaaatacaaaattagcttggggtgatggcgcatgcctggctgaggcgggtggatcacaaggtcaggatgcgccatcacgcccagttacccgggaggctgaggcaagagaatagcttgaacccgggaggcggaggttgcagtgagccgagatcacaccattgcactccagcctggacaacacgagggaaactccgtctcaaaaaaacaaacaaacaacaacaacaacaaaaacgtaaaacaaacaagatccctccaattaaaacccatgcctattaaagtgcatgggggcccaatgacctactgtttggcaaaacttgaaggtctaaaagctgttcatggtcaaagaaacaatttatagttgaggtgatggatatgataaatagcctgatttgatcaacctacaatgtatacttacatcaaaatatcacattgtaccccataaatatatacaattattacttttttaaaagattttttaaaactttttaaaaatacacacaaaaagcagtttgtggtctaatttctttttccttgctcagcctcatcttttagcacctgtttatacacatatcacctctattcttgtaacaaaaataggtagaactggccagacacagtggctcatgcctgtaatcccagcactttgggagaccaagatgggaggctcaatagtttgagcccaggaattcaagaccagccagggcaacacaccagaccctatccctactaaaaattaaaaattagccaggcatgctgcacaccagtagttctaggaacttaggaggctgaggcaggaggatcatttgagcccaggagttcaaggctgcaattagtgatgatcatgccactgtactcccacttaggtgacaaaacgagactttgtctaagtaaaaaaaaaaaaataggacgtcccagtaccccaatctatgtctctcctctccatctcccagtccatatttaagctgtgcctcaaatataccatgctgtctaatgcatccacacctttgcatgtgctagtccctcctctaacacacttccacattttccaacgcccttcatcttgtccctctagcaaccttctgtttattcttcaaaagaattatcttagatcccatggcatcatccctaatttgccccaggttttcttggacacttttgttacattcccattgttccactgtattctagcatatacaccaatttttttttctttttttcttttcttttttgagatagagtttcgttcttattgcctaggctagagtgcaatggcgtgatctcagctcaatgcaacctctgcctcccgggttcaagcgattctcctacctcagcctcccgagtagctgggattacaggcatgcgccaccacacctggctaattttgtatttttagtagagatgaggtttctccatgttgttaaggctggtctcgaactcgcgacctcaggtaatccgcccacctcggcctcccaaagtactgggattacaggcgtgagccaccgcacctggcatatacatgaatttttttgtttgtttggttggttgtttttttgtttgttttttttgagatagagtcttgctctgtcacccaggctggaatgcagtggcgctatctcgactcactgcaagcttcgcctcccaggttcacgccattctcctgcctcagcctcctgagtagctgggactacaggcgcccaccaccacgtccggctaattttttgtatttttagtagaaacggtttcactgtgttagccaggatggtctcaatctcctgacctcatgatccacccgcctcggcctctcaaagtgctgggattacaggcttgagccaccatgcctggcccatatacactagttttttactgtaggccgtaaggccctttgaaccctcgatatataatacttgctcaattatgtttgtttagtaaaggaatgattccatttgcaccataaactctcttcctgtgaccagcatatgaatgtgtgtgtggtctctaagaactcgaatgatgcctaagctatccaacccactttcctcagtttttatttacgcagaaattgaaattaacaaactaatttctgagtcttaagtgaaattgttttcgttttatttaaagttacccttgacttacatagttttaaccttctggaaagttcttcttttttctctctctcttcctgttcctgattgccacactggatagaaagttctaaatgaatacttaggtttgaaagtatttttctacatctatttattttgccattctacagatttggctccattgtcctaaggtttcagcacaataaaaatctcgtttctcccagtgcttgtcttgacatcaatgtagcattaaaaagtccaagacttttacagactaatttaagctgaacaaggaaatatmatctggtacctactaagaaacataaatgggcctgggttgctagcagttcctggaagtcactgtgttttccaataaatccatgcaaatcgtaacagggaaagagaagccacaaagcagaggctgggactgttgggatcatgttagtaattaaactctctctcctcttgagactcagtgagagccttccccttacaaaaaaacaaaaaagaccatagcttgctgccaaagcggatctgaccacgcgtcctctcactctaagagattaaaataaagcctcctgcagtccttttctccaaatacacaaagaagtggctgggctgaggctcaagggcacagttccagtccctgttggcaagagaagggcagggctctggttctcccaaagggtgcaaaggacaagaatgtttcctagaaaagaaaccagggaaggagaccaaagtagacctagctgatatggagctgttatgtgaaaactgaaagctgcttcgatactacttcaaagccagattattctgggaactgaagggagactgagccttcaagtaatatgactagggaagtcaagtacaaaaaaaaaagtgagaccaggaaggaacaaagcatgcatttggagctaataccactcattggaagaggttgtttggaaaaggtttgcaaataccacaaaaatgggattcaaagtgtctttatgtattgtgatattcattgcagcactatttataatagcaaaaaactggtagcaactgaaacatctagcagtaggtgaactgttttatagccatggtctagaacattaaaccacaatttaaagttttctgtgcatatttaataacccaagaagatgttcataatataatattgagggtttttttgttgtttgtttgtttgtttgtttgagacggagtctcacactgtcacctgggctagagtgcaatggcatgatctcggctcactgcaacctccacctcccgattcctctgcctcagcttcaagcgattcctctgcctcagcctcccgagtagctgggactacagttgcatgccaccacgcccggctaattgtgtattttttagtagagatgcggtttcactatgttggccaggctggtctcaaactcctgatctcgtgatctgcctgcctcagcctcccaaagtgctaggattacaggcgtgagccaccgcgcccagccgtttttcaccctttatagttgttttttgtttgttttgttttttgtgtgtttgtttgtttgtttgtttgtttttgagacagggtatcactctgtcactggagtgcagtggtgcagccttgactcactgcagcctctgcctcctgggctcaagtgatcctcagcctcccaagtagctgggactataggcatgctctaccacactagggtaatttttgtgtttttagtagagatgagttttgccatgttgcctaggctggtcttgaactctttgggctcaaatgatctgcccacttcagcctcctaaagtgctaggattgcaggcgtgagccaccatgccagccagtctctttttaagaccctcttcctgatcatttgagcccaggaagtcgaggccgcaatgagccatgcactccactgccactgcactctagcctggacaacagagatcctgtctcaaaaaaaattaatgtccttaaaaaacaaacaacagaccaggcacggtggctcaygcctgtaatcccagcactttgggagactgaggcaggttgatcacctgaggtcaggagttcgagactagcctggccaacatggtgaaaccccgtctctactaaaaatacaaaaattagccaggcctggcggcgggcgcctgtaatcccagctactcaggaggctgaggcaggagaatcgcttgaacccaggaggcggaggttgcagtgagttgagatcacaccattgcactccagcttgggcgacaagagtaaaactccatctaaaaaaaaagaaaaacccaaacaaaaagaacactagttgcctctgaagatggtgagcctctgaagatgcctctgaggctcaattttgagggaattctatatcctgttaaaagtccaaggtgcagcatgtaccagatggctgtatgccctcctctttctggggcagggttgacagtaataggcaggaatgtatcatatatatgtatcatatattttgtggttttcagcagtgggttttttttttcctttcttaatagaaattgatgctatttaatttttataccttttgttgttgtttttaatggggtttgagagaagagagtaaagtgaaaatgtcactagtcctttaattagaagtccatatttccaccgggcacggtggcttatgcctgtaatcccagcactttgggaggccaaggcgggcggatcacttgaggtcaggaatttgagagcagcctggccaacatggtgaaaccccatctctactaaaaatacaaattaactgggtgttgtggcgggcacctgtaatcccagctacttgggaggttgaggtgggagaatcgcttgaacctgggaggctgaggttgcagtgagttgagatagcgccactgcactccagcctgggccacaggagcaaaactttgtcagaaagaaagagagagagagagagagagagagagagagaaagagagagagagagagagagaaagagagagagagaaagagagagagagagaaaaaactcggaagtagactttttttttcttttttttttttttagatggagtcttgctctgtcgcccaggctggagtgcagtggcgtgatcttggctcactgcaacctctgcctcccaggttcaagcaattcttctgcctctgcctcccaagtagctgggactacaggtgcctgccaccacacctggctaatttttgtatttttagtagagacggcattttgcgatatcggccaggctggtctcgaactcctgacctcctgatctgcccgcctcggcctcccaaagtgctgggattacaggtgtgagccacctcacctggcctcttttatttttatttttatttatttatttatttatttattttgagacagagttttgctgctgttgcccaggctggagtgcaatggtgcaatctcagctcactgcaacctccgcctcccgggcccaagcgattctcctgcctcagcctccggagtagctaggattacaggcatgcaccaccatgcccagctaattttatttttagtagagatgggatttctccatgttggtcaggctggtctcgtactcctgacctcaggtgattgacctgccttggcttcccaaagtgctaggattaaaggtgtgagccaccacgtccagcctggaagtagacatttttttattaaccaaaatgaatttagttagctcaccattgcctctacaaaaattgtactgggaccaaaaactttgtatatgagacaacaaattttctaaaatgcaaatcttaaagacaaataatgttagtgtccagaagaaaggttattgggtcagtctttcagattatttccccataacaccaagttccaaaaaacaatttctagtcatttgtgggatgctccagagagcccttgggacaagtaaagttgcagctgtttgtgtgtgttgtaattcaagatgatgtgttgctacatctactagtttggtacaactgttatgatcagatagacctagttccttaaggctgagacacaacagtctggtttctgtaatggaaggatgagtaggctttattctgttttgttgctttttttctttctttcttttaaataatacattctaagcctcgatcctggactttgcaggaaaaaaaaaaaaaagaataatacattctaccctcacatatagtcaattgattttcaacaatggtgccaagacaattcatggggaaagaatactcttttcaacaaatggtgatggaacatccacatgcaaaataatgaagttgactttgggaggccgaggcaggaggatcatttgaacctagggagtttgagaacagccaaggcaacagagtgagaccctgtctctattcaaaaaaacaaaaagaaagaaagaaaaaagaatgaagctggactcctccctcacaccacacacaaaaattatctcaaaaaaaaatctaaatataaagactaaaactataaaattcttaaaagaaaatataggaatcttcttgagcttggatttgctgatgattttgatggcagcagcggcctgtttggagtggtggctactgccatgacaccagcattgaggggactggtgggggagtgggcatggctggggctgcacactccatggagccaacggaagccaagaacaggcgggagccctactcccttctgagttggcagggccagtgcagctgcagccaaccagctgtagctgtggacccaggcatccctgcactcttgactcaggaagccccctgcccccacaggctcaaaaatgcctgctcccactgcctggcctcttcctgttcctggtgcccrctccaattttggagcaaagttgaggctgagcccaggcactgtcgcaacctgccacagtgcacgcatgctcagggcagcactgatacaccagccccctgccaacttggccctctctgggctttgggcagagatgagcacaagtgggaggccgagggggtgctgagggcagctcaccatgggcctgcaggcaccccttggcacaaacagccttggtgccatggacacttggatggcagattgatggcagcaggaggcagacaggctcgtggactgaaaggggcaggtgcccgatgaagccccaccttcaagccagtgacagcctgaagcctgtgggctgggctgccagttccatggactggagtgagaacttatggtgctttttctggacctgcccatggcaaaccatggaccaattcagcactcatttcctcccctctgaagcccataaaaacctcagtctcagccagattcaggcagacaacaggaagacctgcctgctgttaggagctactcactccatgtctcttctccactaagggctgcagagatgatgggatgatttgcctgcgaataggagctacccactccaggtctcctgtctgctgagggctgcacagacattgggatgacctgcctgtggaagggagctactcactgcaggtctcttctcctctgacagctggatactcgttgggatgacctgcttgcagaaaggagctacccactttgggtctcctgagaatggttctgcctctcagtgaagctcctctctatcttgctcaccctctagttgtccgtgtacttcattcttcctggacagggaacaaaaactcaggacctgccaaatagcggctaaaagagctgtaatacagccggtcacagtggctcacacctgtaatcccagcactttgggaggctgaggtgggcagatcaggaggtcaggagtttgagaccagcctgaccaacatggtgaaacccccgtctctactaaaaatacaaaaattagctgggcatggtggcacatgcctgtaatctcagctgctcaggagtctgaggcaggagaattgcttgaacccaggaggcagaggttgcagtgagccaagatcatgctactgcacttcagcctgggcaacagagtgggactctatctcaaaaaaaaaaaaaaaaagagctgtaatacaaatagggctgaaacatatccctctgcttgccacattcccagcaacaagaagaaaagaactgcagccctttggagagcccggcccaggctgttgcgttgcctgctgggctgagtgggcagaacaaacccagtgggtgcaagcaatactcaggcagaaggcatcactggccacagaggtttctagctggcgaagcaacaccccaaggatcctgtgacaatttattgaatatgacaccaaaacagtaatcaacaaaagaaaaaatagataaattggacttygtcaaaattaaaaacttttatgcatcaaaggacactatcaagagtgaaaagacaatctaaagaatgggagaaaatgtttacaagccacatagctcatcagggattgataytcagaatatataaagaagtcttacaacaaaaagacaaaaaatagggtgggcacagtggttcacacctgtaatcccaatactctggaggcagagagaataataatacattattattattgcttgaagccaggagtttgagacccgcctggaatttgagacagggatgatccctccacctcagtgcctcccaagtagctgagactacaagtgcgcaccaccatgcctggctaatttttttgtattttttgtagatatgaggtttcaccatgttgcccaggctggtctcgacctctgaggctcaagtgatctgcctgcctcagcctcccaaaatgctaggattataggtgtcagctaccaagtatggctcaaaaagtaatttaaaaattattaaaattgccactgtggccaggcatggtggctcatgcctgtaatcccagcactttgggaggccaaggcaggcagatcacttgaagccaggagttcaagaccagcctggtcgacatggtgaaattccatctctactaaaaatacaaaaattagccgggtgtggtggtgcgcacctgtaatcccatctactcaagaggctgaggcgggagaatcacttgaacccgggaagcagaggttgcagtgaggcaagatcacaccactgcactgcagtctgggcaacagagtgacaccctgtctcaagagaaaaaagacaatccaattgaaaaacaggcgaaggacttgagtaggcatttctccaaagaaggtatcaaatgggccaaatggccccaaatcacatgaaaacatgttcaacatcataagtcattagtggaatgcaaatccaaaccacagtgagatgccactcacacctacataaattttttaaaggaaaaataaaagtgttcgtgtgaatgctgagatattggaaccctaatacattgctggtaggcaagaaaaatgatgcagccaccacagaaaacagttcggcggttcctcaaaaacttaaaaataaacaccaaatacaaatggtttgtgtctgtaaccccagctacttgggagactgaggcaggaggattatttgaggctagttcaagaccagcctcagcaacatagtgaaaccccatctctaaaaaaaataaaaattaaaaataaacatagaattaccacatgactagcaattctctttctaggtaaatgcctaaaagaattgaaaataataattcaaacaaaaacttgtatatgaatgttcatagcaacactattcacactagccaacaggtagaaacaaccaaaatgtttgtcactgatgagtggataaacaaaatgtagtatgttaatacaattagaatattatttagccataaaaaggaagaaaatactgattgatgctgtagcatggatgaacctggaaaacattatgctaagtgaaataaattagacacaaaaagctacataggattccatttatattaaatgcccagaagaagcaaatccatagaaacagagtatataagtgtttgccaggggttgggaggagggaaaaatggggtttattataatatggtttatttggggggggggatgaaaatgttctagatttgataattgattgtggtaatggctgcacagctctgtgaacttactaaaaaattgaattgtacagtttcttttatttcattgagataggatctcgctcccaggctggagtgcagtggcttagtcacagctcatggcagcctcaaactcctgggctaaagtgatcctcctgcctcagcctacagagtagctgggactacaggcacacactaccatgcctggctaattatttttatttttagtagatatgaggtctcactatgttgtccagtctggtctcaaactcatgactgcaagcgatccttatgccttggcctcccaaattacagttgtgagccaccacaactggccaaattatacactttgttttattggtttttttttgtttgttttgtttaggtttttttttgttttttgttttcttaaacgaagtctcgctctgttgcccaggctggagtgcagtggcgtgatctcggctcaatgcaacctctgctttccggattcaagcaattctcctgctcagcctcccaagtagctgggactacagtgtgcaccaccacgcccagctaatttttgtatttttagtagaggcagggtttcaccatattggccaggatggtcttgatctcctgacctcatgatctgcccatctcggcctcccagagtgctgggattacaggtgtgagccaccacacccagcctgtaaatgttgactttttttttttttttttttttttttgagacagagtttcactcttgttgcccaggctggagtgcaatggcaaggtatcagctcactgcaacctctgcctcctgagttcaagcgattctcctgcctcagcctcccgagtagctgggattacaggtgcccccaccaccactcctggctgatttttttttttttttttttttgagacagtctcattctgttgcccaggctggagtgcaatggcgtgatcttggctcactgcaacctctgcttcctgggtttaagcaattattctgcctcagcctcccaagtagctgggattacaggtgcctgctatcacacccagctaatttttatatttttagtagagatggggtttcaccatgttggccaggctggtcttgaactcctgacctcaagtgatccatccgcctcagcctcccaaagtgctgggattacaggcatgagtctctgggtatggccttaatcttttgtatttttagtagagacgaggtttcaccatgttggccaggctggtctcgaactcctgacctcaggtgatccacccacctcggcctcccaaagttctgagattacaggtgtgaaccaccacacatggcctatataaattgactcttaataccagaaacagattagctgctctagaaaataactgcctagctctttgaaatgcctcacctagaatgtcctcacaaggagttttgtgtatgccatgtaacctttaagtcaaactagtcttcccaaacacatcgtcattattattattattattattattattattattttgagacagagtctcactcttgcccaggctggagtgcagtggcgtgatctcagctcactgcaggttactcactgcaacctctgcctccctggttcaagtgattctcctgcctcagcctcccaagtagctgggattacaggtgcccaccaccacgtctggctaatgggggtttcaccgtgttggccaggctggtctggaactcctgacctcaggtgacccgccctcctctgcctcccaaagtgctgggattacaggcgtgagccaccgcgcctggctactttccatattattgaaatgtgatgtagtcattttcacatgacaatgtgaataaagagacaaacttagttttataatgtttcacatcaatttatataatgcttatagtccttctaagagggtaaaggcctttgtgaggaatcagccaactggctgcagagtagtggtattatttttttctgtatgagaagggaagtgacactgtgtcattgtgaggtaacagaaagggatttggagaagaacacctaggaataaagggaatagtgttaccttaagactaacacttagggatatatggtaaggtaactaacggtgaccttaagggtgctgattaggtcacattcataaatgggtggggagtgatgccaaagggcacatagtgagcaagttgtggtcacgaggtgattaggacagatgatttagggctggagactcctgtgggtgttaacatgatgactgcataggtgctcaagactgcccatggtggagtattagtccccacaacctaactggcatcaagaatcagggaaaccagaccaggcgtggtggctcatgcctgtaatcccagcactttgggaggctgaggtgggcagatcatgaggtgaggagttcgagaccaacctggccaacatagtgaaacccctctctactaaaaatacaaaaattagctgggaatcgtggcacgtgcctgtagtcccagctacttgggaggctgaggcaggagaatcgcttgaacccaggaggcagaggttgcaatgagccaagatcrcaccactgcactcgtagcatgggcaacagagcgagactccgtattaaaaaaaaaaaaatcaaggaaactttcttagaaacagctgggtcttaatagtctcaacaagttaaggagagtttctgggcttcagaccccgcatttccccccatgccctgaagagcattatagaccctgtactttaagaagagtaaaagtcctgagtatcctgttaggaatcatcccatccctgggcagcttctcctcagtactaaccatgaggaaggggaactgagggccctttcacccagagaggactcttcatcctgaagagaagtgagaggacatgtctgaaaaacacaccaagataaagtatctggctgtcatgactctttctagaaaaatctcagtgctgttttacataacctcattcatctccagaattagaatgagtatcttctggcctggtgtggtggctcacacctgtaatcccggcactttgggaggctgaggcaggcggatcacctgaagtcagtggttcaagagcagcctggccaacatggtgaaamcccatctctacaaaaatacaaaaattagccctgcatgatgggggaggctaaggcggaagaatcgcttgaacctgagagagggagcttgcagtgagccgagatcgcgccattgcactccagactgggcaacagagcgagactccatctcaaaaaaaaaaaaaaaaaaaagaatgaatatcttctattacttcatttattgtgccaggtactcttactcttgggcaactgaaatcatggcttcatatctatgaattgagtgaggtggtactcacatcaccagcctcttatgttgaccgaatcaagacctttaactgcctagtagactgacttacaagtggagctgctcaacagataatagtttctttttttttctagacgggagtctcgctctgttgcccaaggtggagtgcagtggcgctatctcggctcactgcaagctccgcgtcccaggttcatgccattctcctgcctcagcctcctgagtagctgggaatacaggcgcccgccaccatgcccagctaattttttttgtatttttagtagagacggggtttcaccgtgttagccaggatggtctcgatctcctgacctcgtgatttgcctgcctcagcctcccaaagtgctgggattacaggcgtgagccaccacgccttgctcttttttttkkgggggggggggttgtcgtggaaattaagtttatgaatctccttgatctctgaattattccaaacagcaccatcccagcaattccttttaattgtttttagaactacagttgacctttgaacaatgagagggttagggtgccaactcccaccaatgcagctgaaaatctacataaaagattagattccccaaaccactagtagcctattgaccagaagccttcttgataacctaaacaattaacacatattttgtatctttatcatatactgtatttttacaataaagtaagctagagaaaagaaatgttattaagaaaatcataaggaagagtaagtgtatttactattcatgaagtggaaatggatcatcatgaaggtcttcatccctgtcttcacattgagtaggctatcttgctgtctcaggggtggcagaggcggaagaggtggaggaagtggatggggaggcggaagaggtggaggaagtggatgggaaggcgggagaggcaggcacacttggtgtaacttttgttgaaaaaatatmtttgtataagtggacccacgcagttcaaacgtgttgttcaagggtcaactgtggtcatattgtcggggttctttagccattaggtctcagaaattagcctgaatttagccagacatagtagcacacgcctatagttccagctgcttgagaggctgaggcgggaagatcacttgaacccagactgcagtgggctatgatggtgtcactgcactccagcctgggtaacacagtgagactccatatcaaaaaaaagaaaaaaagaaaaaaaaaagaaaaggaaagaaattaacccgaatttgtggtttctaacttggcaattagtctttctttgaccccaagtttagactcaatatcttcactaagagccagcccagggggtgcaacttggagcaccagaatgtttgtgtaatactagccatggtaaagaaggtgtcccaggctctcctggtggaggcaggctctgctctacttaactctactccaggcaagagcagacaaagagcagactctttagactggtaagcagaacagactcgtccctcaaggagctcccagaccagggaggggaggagactgtaaatattcaccatgccgtggtaacagcagagatggagcacaaggggaagttcagagaaagatctcagaagagaggtactttgtctaacctgagatttagggaaagttctcctgaagatgatgactggtctacatgacctgagccgagatgggaatgagttgaaaggtaggcttgtgaagaagcaggagaagagcattatagatagaaaactcaaaggcatcagaggccccaagctgcatgctatgatattgggataatagtagtacaaacatagtgcaagacagtggtgtaaagtgagatatttgcttctgagccatttcccttctgttgccacttcctcttcctcttttaagtgaaacattactagcagcctaataattatcatagctgacatatattaggtgttttttgttttgttttgtttgttttgtttttcttgagatgaagtctcgctcttgttgcccagactggactgcaatggtgccatcttggttcactgcaacctctgccccctgggttcaagcgattctcctaccttagcctcctgagtagctgggattacaggcgcctgccaccatgcctgactagttttttgtatttttagtagagatggggtttcaccatgttggccaggctggtctcgaactcctgacctcaagtgatccacccacctcagcctcccaaagtgctgaaattacaggcatgagccactgcgcctggcgtttttttgttgttcttgttatttgtttttttagatgggagtcttgttctgtcgcccaggctggagtgcagtggcgcaatttcggctcactgtagcctctgcctccaggattcaagcaattctcctgcctcagcctcctgagtagctgggactacaggcgcgtgccaccacgcctggctatttttttgtatttttagtagagacagggttttaccatgttggccaagatggtcttgatctcctgacctaatgatctgcccgcctcagcctcccaaagtgctgggattacatgcgtaagcaaccatgcccagccaggtttttactctgtccaactctattctacatcccttaaatttattaacttgttaaattctctaggagtaaatgctgtcattactcccattttacagatgaggaaactgagtcgggggagattaagtaacttctcaaaggtacacatagggccatgtggtctgtcatctctgctttagctgacacatatggcctctatagcctaggctttacatggccagtctccatccagactgactagagtggtgttttgtaaaatatagaggttgatctgcagcctaggtgcaatagaattacctggggcaggccaggcactgtggctcatgcctgcaatcccagcactttgggaggctgaggcaggtggatcatctgcagtcgggagttcgagaccagcctggccaacatggtgaaaccccgtctctactaaaaatacaaaaaaaattagctgggtgtgttggcatgtgccggtaatcccagctactcgggaggctgaggtaggagaattgcttaaatccaggaggctagggttgcagtgagcctagatcacccactgcactccagcctggtaacacagcgagactccgtctcaaaaaaaaaaaaaaaaaattagaattacctggggcatttgataaaacacagatacctaggctccactgtactctgcatgaatctaatggggtgggtgattaagaacctgaatttttttttttgaactccccagatgatcctaaggcacagtaatgtttgggaacctctgggctggagtctctgggttgaaatccaagttttgttctgttttttttaagaatgagtcattgcatctttcaagtattcaaccaagattgtcttcataatcttacacttcattcatctgtctttacaaagttacagagctgaagccatatcctgtttcttcagcactcatctatactttaaaaattctaggccaggcatggtgggtcacgcctgtaatctcagcactttgggaggccgaggcgggcagatcacctgaggtcaggagttcgagaccagcctgcccaacatctgcgaaatgctgtctctactaaaaatacaaaaaattagctgggcatggtggtgggcacctgtaatcccagctactcaggaggctgaggcaggagaattgcttgaayccaggaggcggaggttgcagtgagccgagcttgcaccactgcactccagcctgggtgacaagagcgaaactccatgtcaaaaaaaaaaaaaaattctaatcagatgccagtctcactgtcattctccartcttcccactataacatatttagttcattgtcctgcccgtgttctaattttgcagttttcctagactgatcctctgtgatccaacaattaattataaattattaattataaattaattaattataaattaataaaaattgtgatcccacaattaatttcaaatttattaaatagaacctgagaaaaaattatgcagtatttttttcattagatgattgtcagcctcctaccaacaagcatatgctagatgttacccatgaaaacttaagtagtcaggccaggcacagtggctcacgcctgtaatcccagcactttaggagattgaggtaggcggatcacctgaggctaggagtttgagaccagcctggccgacatggtgaaaccccatctctactaaaaatacaaaaattagccgggtgtggtggcgggcacctgtaatcccagctactcgggaggctgaggagaatcacttgaacccgggaggcagaggttgcagtgagccgagatcgcgcaactgcattccagcctgtgcgacagagcgagactgtctcaaaaaaaaaaaagagaaaaggaaaagtagtcatgatccctcccttggactcatttccagtgtaaaggttattaacctttttgtaattgggatgtattatgaatgactgctcaattcaacaatgtacctttttcctcagtaattcctaaagaagtcatagaatgtatgtatttctttattgaataaagtctattaaaattattgtgattctaaggcatcttagggaatttcattatgtctcctaaagctagactcaaaaatagaattaggaattattcttctttagcaaccttcattatgtstcttaaagctagactcaaaaatataattaggaattattcttctgtagcaacctcaagcagtccaggatcagtcctcagctccaccttttgtgacagtgggcaggcacattcatgctctgaccctcaggcttctcttcatcaaataggagccttgtgttagattatctctgaggttttttcacaactagcattttgtggttcaataaacagaataattgtcctgcaaataggtacgtaccctaaatagggttacagataaaatacaaagtgcctaactaaattttagtttcagataaacaataattttttaatgttaagtgtgtcccaaatttcacatagaacactttttttttttttgagatggagttttgctctgtcgcccatgctggagtgcagtggtgcaatcttggcttaccgcaacctccacctcctgggttcaagcaattcttctgcctcagcctcctgagtagctgggactacaggcgcacaccaccacacccagctaatttttgtatttttagtagagatggggtttcaccatattggccaggctggtctcaaactcctgacctcatggtctgcccgcctcagcctcccaaagtgctgggattacaggcgtgaaccactgtgcccggccagaacataattatactaaaaaattattcacttgtttatctgaaattcaaattttattttattttattttcattattttttgagacatagtttcctctgtctcccaggctggtttcaaactcctggcctcaagcaatcttcccaccttggcccccgcaaagcactgtgattataagtatgagcctccatccatgcccagcttaaaatcaaattttaactggcatctgctattggcaaccctaaccccaaagccattgctttttatcccattttgtgaaagtcagtgtcactatttccctactgtgagcttgcttatttctgccttttatccttagcctgaaacaagttgtgaatatcaaatttccactcactccattgctttacctatgaaataaattcccagaacttagaatagttaacagcaatctgtttcctagaactagctgccaggactacacctggacatctgttatttacagcctcattattgacattttgtcaatagttctgacctatgccatgtaatctgttatagtcatagcatgccttcctggaaattttcatttgcctctattcctattgtattatttgggttctttccatatttgtttgttcaagattctctcatcattaaaaacaaataaacaaaaacctctacttaaccctcctcatcccattactgctctacttctcttccttcataaccaagtattatctacatgcattgtcttcacatcctgttattaattccccaatgcattaaattctggctcatcgtcctactacttctcgctgccattgaagctcctctttccagagtcactggttacttcctatttgtgaaatcagtaggaagcttttcagtcccagtcctactggacctctcagcagctctggccaatgctgaccactcccccaatccagaaaccactcttggcttctgtaacagtccctggctccagctgtcctcctacctccttacttccctggccacttgggtcggtcaccttcagccattcttgtcatctgcctggtcctctatgattctcagtgttcgatgcacactctgtagttgtgattgaggtatttacaaaaaactggtgccccactgagccaggttcacgtggaagttgggatgaaacaggattctgagaggacatgggaggaacatgggtttcactttgtttctttattaatctttgaaatgtgtttgtttattcatttagcactcattttttgagcatatactatatctcaaatatcaggtcctaggagtacaaaatggcaagtcaagtccttgccctcaaggagcttgcagtctaggaaaagccaacaaaccaactaatgatgtgaggacagcacacaaaggtaccatggactcagatgcaggagccaggaaagacactagagacaggttgcctgtgatctgagctttaagagacaagtaggaattagccaggtgcattccatatgagttcttccagatagctggagtccacatgcctgagggaatatgacagaagatcaagtgagggagccaggcaaatgccagatcacaaagaccatgtgtcaggtgaaggttatggaattgaaatgtcttaaaactataaggagctttgaagtacgtcaaaatgggcaataaattgatctgattttcattttagaaagacttcttttgacaacactgtggaaagcagcttgggaagggggctccagacttggtgcagtggaaccaataggyatggtcacgtgagaaatcagagtcagaaaaaaaagcagtggcaggggaaattgagagaaggagatagtttctagtgctgctacagaggtagctattctaaggcttgatgaccaattggttgtcaaagataagagggaggaaaaaaaacaaagggtctcccagatgtgtgcatttagtgactgcataatgcatcacctccactaaatgattcatctgttcttcatccctgttagtctggacaccaaaaatatcactctgcctaaaggggggaaacatttctttgagggaaaacccttttgccctatagctaaactaagccattggaaactttttagggcagaaatgtcagaggcatgaacagggcttctggaggagggtgaggtctccaggttctcctggctagtgaagaggctcatgttctcattagcaaactgatggcctccatcgatggccgtgatactcacagggcgtggttcaaagccccagatcatcagggcttctagagtstacttaatcaggacaggcatttatttaaagtgctctgaagctaactgtcacaaatagggaaccttagtactggtcagttgggaaccaaggttattaccaagaagatagtgtcaggtgtcaagtgtggaagtcaggacaaggccagatgtaggagataagagtgaaaccagacgtgagaaggttggagcgtgtaaaggaaatgggtcacaggacaagcagttcagacctgaggccaagaagaggaaggcaagagttctcttgcggatctcagctagaaaacattgctgtagaacataggtcactttgtttgtttgtttatttatttatttattttaagcaaaagcaagtttattaaggaagtaaaggaggccgggtgcggtgactcacacctgtaatcccagcactttgggaggccgaggcgggtggatcacctgaggtcaggagttcgagatcagcctggccaacatggtgaaacctcgtctctactaaaaatactaaaattagccgggcgtggtggcagccgcctgtaatctcagctacttgggaggctgaggcaggagaatcgcttgaacccgggaggcagaggttgcattgagctgagatagccccatggcactctagcctgggggacaagagcaagactacgtctcaaaaaaaaaaagaaagtaaagggataggccgggcactatggctcactcctgtaatatcagcgctttaggaggccgaggggggcggatcacctaaggtcaggagtttgagaccagcctggccaacatggcaaaaccccgtctctactaaatatacaaaaattagccgagtgtggtggcttgcgcctgtaatcctagctactcaggaggctggggcaggagaatggctggaacccgggaggcagaggctgcagtgagctgagatcacaccactgcaccccagcctgggcaacagagcaagactccgtctcaaaaaaaaaaaaagaaaagaaagaaagtaaaggaataaagaatggctgttccaccggccagcaaagtgggatgctccactaaggacacttacagtcattttctgattatactctaaacaagggctggcttattgagttttctgggaaagaggtgggcaattcccagaactgagggttcctcccattttagaccatagagcgtaacttcctgacgttgctatggcatttgtaaactgtcagtggcactggtgggagtgtcttttagcatgctgatgcattataattagcgtataatgagcaatgagaaccaccagaggtcactttcattgccatcttggttttggtgggattttggtgggatttttattgcaggttgttttatcagtaaggtctttatgacstgtattttgtgctgacctcctatctcatcctataagtaagaatgctaacctcctgggaatgcaacccagtaggtctctgccttattttagccagcccctattcaagatggaattgctgtggttcaaatgcctctgacatatttcaccccttccttttataagagaacccttaatcctaagggctgtagagggatgaagatccatcttctgtgacttcttcaggctgaataggggcaatgatattactgcctattagggtctcttgtatttggggtagagaggagctctgtcagaaagtgtcagtatggaggctgggtgcagtggcttacacctataatcccagtgctttgggaggccaaggcaggcagatcacttgacatcaggagctcaagaccagcctgggcaacatggtgaaaccctgtctctactacaaatataaaaattagccaggtgtggtggtgggtgcctgtaatcacagctactcaagaggctgcggcaggagaatcatttgaacccaggaggtggagtttgcagtgagccgagatcaggccactgcactccagtctgggtgacagagtgagactctgtctcaaaaaaagagaaagaaagcgtcattatggtgagggccatttataactctgacaaaaggtgatatctgaaagattaataagtgttcaatttaagaaaacattcagtaagcttatcctgcattcctacacaaagagtacaacagcaacacattccacaatggtaaagcaaaataagtaaaattattcaaagtaaactaaataagaagtctttccatgaactgggcaattgttgaaaccaagttgatatggggtcactagcttattccaatatgtgcccagaattagaatattgatccagatttttacattatctatccctcttgtttcttctaagtagcagccagagatcactggttggttctcaggaataagcagtcagtttaaattgcagaaaaaaaacttaaaaactactgataagactagactctggccgggtgtggtggctcacacctataatcccagcactttgggaggccaaggcgggtggatcacctgaggtcaagagtttgagaccagcctagccaacatggcgaaactctgtctctatgaaaagtacaaaaattaactgggcaggcgtggtggcgggcacctgtaatcccagatactcaggaggctgaggcaggagaatcacttgaacctgggaggtggaggttgcagtaaggcacaattgtgccactgcactccagcctgggtgacaagagtgagactccatctcaaaaaataaaataaaataaaatgactagactctgataacatgcgtaccatagtttttgaaacataacgtttttctctccagtctcccatttttactaaagacaaatcatggtaactgatttgctttgttatacttggcctcattatttgtataaagtgcagcaacaataattatttttcacataggcttttaaaatcagctttgatggaattttgttccttagaaggaatctcagataagacttttttaaagctgagcccagccatgggtctgtaccctcaaatatctatatgagttgggtaaatttctctcttcttgagatcccaagataacttggggctcctggacttgtcataaagtgacattctttacttaccacaggtcaagaaccctgtacagggactacgtagacaatgtatgaggccagttttcctaaggggcttttattggcactgtaagtcaagtttgattccttaaaggaaagagtgtcattccagtcaaagccttggtgaaaaaaaagtttctccaattgtgttctgatacaaaagaaaacattcttattgcatttatgcaaataattatattgccataagttaaaaatgctcacaaatggtttctgaattttggagaaattgggcagagagaaacaaatatgcttcaaattttgttcacaggagtatactttactcaattgttaaaagctgttaatagctcaaaagaaaaatttccttggctctgaaaaacaaaagaaaggatcagcaacgttttaagccaaaagttaaaaaaagattgcttcagtcttctgtaggtcaatccatgcagttaactcctgttttgcttgatattcatgaacatttcagctcttcatgagtcctgaaagttttttcctctattttaatgtcacaatttacaaagttattagaaacctacattcaataacacctgttagagttctataattgattataaaaccaccttctaaagaggacaaagacaagacaacaattgtccgtgggtgacaaaacaccttaggatagcctctattaaagccacagttgactaagaattttggttacttctgtggcatacaacaatttttacataacaattataatgattaacaacatacactaagtcatatcagaattgtaggagtttcctgtgattttggaacatataccaataacatatttatacaaatacagcccaaagaaagccaagcgccatttcatatttgacagtgcttcctgtatgatttttataccaaacaagccaaacttcaccattgaattagtgcattattgatgtcaaactcaattctttttttttttttttgagacagaatctcactcttttgctcaggctggaatgcagtgacgtgatcccagctcaccgcaacctctgcctcccaggttcaagcaattcttctgcctcagtctaccgagtaactgggattacaagtgtgagccaccacgcctggctaatttttgtatttttagtagaaacagggtttcgccatgttggccaggcacagggacctcaacagcacatgccagtgaggatgggtctcaaactcctgaactcaggtgatccacctgccttggcctcccaaagtgctgggattacaagcatgagccactgtgcccaggatcaaacccgattcttaataaaactttatagataaatctatccaattttaatgtctgaccataaggtaaggttcttataaacctcttaaaaccctttacaatttttgttaaagagcagattagtgttctaagaaaactctgttgtgcttttattccagtcttcaatttatggataaactgaataatacccctttaattttagctaatatgttcacacacagaatttcttttacaagattaatttttcacaaaccttccacaacttgttcaaacttcaactttttcctatctaacctaaaacaatcctttaactcttaaatctaggcaaaaaaaaaaaatccacattcacatgcctttttataatcttttaccaaaaacacatttcactttccttgcatgtaaaactgatttacttaagtctcatgaactaaaaggcatttatactttttacttttctgacaatatttgatttaagcacctattatttttaaaccagttaatcaaaatgctttcatatcacacacacaacccatataaatacacagacaggcagaataatattcagtagttgttaagatttttcatttgccagtttcttaaatggattatgggtttcagggtagagcgcttggaggaacaggcccaggaaagcacacagtttctagggcatcataagcaggtacagccaaagttggccaattggtgctgcagtctatttcctttgggccagagtttcctcagtattgtcccttcagggttcacctggaagatgttaccgggaaggagtcccaatccagaccccaagagggagttcttggatcttgcccaagaaagaattcaaggcaaatccaaagagtaaagtgaaagcaagtttattaagtaaaggaaacaaaagaatggcaactccataggcagagcagccggtcactttaaattcatttctacaacctaatttttgacatattttagatgccagttcatttactgtaaggcataagattagacttgttggcatcaaaggactgtgacttctaaatgaatgcatataataaagagatattttgcctgcaaggccaatgagacccacttaggatggtcttaggctcagcattatccttgaacagatttatgcatatttctaacttttaaattttcatttacatttgtttattttattatacttcccaagagaagattttctatagaagttttattaaattcttcctattgtacctaaactctgtccccattgtccttctcttgctccagattgtcatatctcagactgatgtgtctatcagaggcacagggacctcaacagcacacgccagtgagtcagtcatcagattatagtagcctgggaatggggtgaatacaggcttgaagtggactagtatctatttccaaggaggcccaatctattgggtaagccattgcagcaagtgtttctagctaacaagatggtcagagtcaggcaggggggccttgctgtgattctgggttgaccttgtttggagctagatgactatagccagcatctaggagagaaaactggttcaagtcactaggcttggaaatgtcatcttgccagaccctcttatggtcttgactaactgggctgggtttattaccagtagaggaacagacaactacatcagggcagaagcccaggcacatggacatggaaaaacatatgcatcactgaggaagagcctagagcttgatgtacacacagatgcttgaggttcaccctggtccattggatactgggtctaaaatatgttttcacattggtaattctaggccttatctgctcctgggggcagaggtcccaccaaatggtgcctgcatgggtccatactgactgtacttgagagaggctaagggtcctataagactggagaaagagggttgatggaaatagattagccttgattgcctggagaatgccagctggttttcagcccccaatactttggagcagaattagttaactttgagtgatgggtggatctttcttttcttctaatttaacttkctgttcatgtttagcttacatacagtattgggtcattttttgcataacttttttttatttctaacagactttattttttagagcagttttaagttcacagcaaaattgagcagaagttatagcccttgccccacgcatgcacagcctctctggttatcagcatccccaacccaaatggtacatttgttacacttgattagcccacattgattgacacatagttatcacctggaatccataatttacattaggcattagggttcactcagtgttttttttgttttgttttgttttgtttgagatagagtctcrctctgtcacccaggctggagtgcagtggcacgatcttggctcactgcaacctctatctcccgggttcaaccaattctctgcctcagcctcctgagtagctgggattacagatgcctgccactacgcctggctaatttttgtagttttagtagagatggggtttcactatcttggccaggctggtcttgaactcctgaccttgtgatccacccacctyggcctcccaaggtgctgggattacaggcatgagccaccatgcctggctcactaggtgtttttaaaaggaaaaaaaatctcacttactttgagaagactcttgtgctttcacatgtataaatataagcactaaaatcacatgaacatacattcatttgaagttttcaaggaaataatcatgaaatgtttcagattattatttaagtaaaaaatttttctaggaatgcatggacccctgagaatttagccacagactctcagggatttgtggacctcaattggaaaacattgctgtagaacagtagttcattttgaactcatttttgcaagctaaattttgacatgttttagatgctaattckaggaatgttctcccttttctaagaaaagtccaagcattttttacctgctctaaaagaatatcaacggcttttatgtttcagagactggatgcaagagattgtttaacaaatcccatcccatccctgagaatgtgtctaggcatttgctctttgcaaagccagatgcaacattcataataactaaggctatcttctggccagcactgcaagtgtatcttttgtctacattcttaagtaaccacatcaaatagcatcaacccacttggaaataattttgaagtgatttggatctctcttgtatattttccctataaatccctagcctggtaggcgtgtatattttctgctgcaatatttaatgcttagttccttgcctacatctaagaaatattaattttagaaggaattggatactgatattggcaaatttttatgagactggctaaaggagaaagaagaaggggacctgtgatagaatcttccatgacaaggrggaaatactggcctcagtctcctgcagaagcaggagctctggtacacaggtggggtgcccactggtacagctcccatctgacatgaagcaggcaagccaaaggggagcaagagcaatgcaacctgkaagacccatcctcagacattctgctattgcccccagacaatggaaggggggcgacagctgtccatgggggcactgctaagagggtgttgatcagcagatcaggactgtaactcaccatagtggtggactgccctgatctggagaccactgcctttcgagaataattcaccctacagaagctatctgagcatcaccagacagggtcttcctgggaattagcacatatcccaaatttccttcagctttgcctgcccacagtcccctgaaagccctccctttttctgggtgtgagaggaatggctgggcatcccttggcttatcctccttcttgcccaccatagccagcatctcagagtgaacatgcacgagggaggtagaaagactccatatccttgttctttacaacttagaaaagcctaagttataggagagagatagcacaatggaatgctgaattagaggtaaataattggtctgtttttttttcaccagtctagttactactattatgtaaaatatctaattttacataccctaaacacccatacccaaacaccttgacaaaggaatcattttacctcccaaacatagtcagtgttgatttcacaaaatatccctagaattactctttctgaggctaacaggactacttagatggttcctaaagtcccttctaactcctgcattctctggttaatgaatcagcattagtcatgtggaaggaaggtatcctcctcaaactctttttaagaatgatctcaaggaatccagagtgctcattaagttggtgaaagagtcagtgcagaatgcagctcatacatatatcctgatgtgatgttggcacctctcaaraagctgggaaagatgtccaggctggtcataggactcagcccctattatgggtccagcagccagtaatagtaagcaatgtctacttcaaaagatatctctggccaggtgcagtggctcaatcccagcactttgggaagctgaagcgggagcatcacttgagcccaggagtacaagaccagcctgggcaacatggcgagaccccatgtctaccaaaaaagaatttttttttttttttagacagattctcactctgttgcccakgttggagtgcaatggcatgatcttggctcactgcaacttctgcctcctgggtttaagcgattctcctgcctcagcctcccgagtagctgggattacagtcacacatcaccatgcccagctaatttttgtatttttagtagaggtgggatttcaccatgttggccaggatggtgtctaacttctgacctcaggtgatctgccagtctcagcctcccaaagtgctgggattacaggcgtgagccactgtgcctggccaaaacaattgttttaattagctggccgtggttgtgcatgcctgtagtcccagctactcaagaggctgaggaaggaggattgcctgatcctaggaggttgaggctgcagtgagctgtgtttgcaccactgcactccagcctggatgacagagcaagaccctatttcaaaaaaaaaaagatatttctgaggagccatgctyattcaagactcactgctcttagaagaggtgttaatctggccaggtgccgtggctcacacctgtaatctgagcactttgggagggtgaggtgggaggatcatctgagacctggagttcaaggtcagcctaagcaacagactgagaccctgtctcttaaaaaaaataagagagagatgttaatctatattaaacaattgaatagtgtgaagattttgtaaaactttttaaatcaccgattatacaaaagctcttattgaattattaaggagttagcaattactattaatgctgttgaatatgagtaagaacccacttaacttcaatcagaatccatcgatcaagcttaaagccttatctcatagttcccttcctggtctgtcagcattgcctcatagagagggaaatacatcccgcatctgcctcatcatgaacttgggtggccaccaggatattgctcatgaaagctgcttttctttctttttttttttttgagacrgagtttcactcttgttgcccaggttggagtgcaacggtgcgatctcggctcactgcaacctccgcttcccaggttcaagcgattctcctgcctcagcctcctgagtagccgggattacaggcgcccgccaccacacccaggtaattttttgcatttttagtagagacgtagtctcaccatgttggccaggctggtcttgaactcctgacctcaggtgatctacccgccttggcctcccaaagtgctgggattacaggcatcagccactgcgcctagcccaaaagttgcttttataaacaggttcaaggccgggaaatccattctcctccacctcccaaagtgctgggattacagatgtgagccaccgcacccagccagttcatagtttaaaacaaagatgatagcagccccttctcaaaacaaatctccttcttgcctggggactagactgcctttgtaggactaacgaattaggcacaaaattaaacattatattttaggagtcatgcagctgggggctacaagattctgaccctccctaaactgctcctaagatcagtgcttgagatattttgcaggcctgcacttgatggatcagctgacaccacccagatcaattaactggctcatctgatcttgtggcccccacccaggaactgacttagcacacgaggacagcttcaattccctatgatttcatctcctacttaaccaatcagcactcctcactaactggcttcccccaacctaccaagttgtccttaaaaactctgattccagaatgctacgggagactgatttgagtaataataatactccggtctccattacagctggctctgcatgaattaattacagccggctctgcatgaattaattactctttctctattgcaattcccgtgtattgataaatcgactctgtctaggcagcaggcaaggtgaacccactgggtggttacaacattagatagcaaattggcaattaaagaatatatctgtagagacaggatcttactaatgttgcccagctggtcttaaactcctggcctcaagcagccctcccaccacctcagcctcccaaaaggctgagattacaggggtgaracaccacacctggccaaattggcaatttttgaagaaagatttctcacaaggactttgcaagctttatgtactttatttgttgcaataatatgaaatgcatctttctgggaaggagaacacaggtaactgatttcagtgtaatacctagcactcatgscttgctaatcctttttatatcctatgagaaaggaaaaatccaggccgggcgcggtggctcaagcctgtaatcccagcactttgggaggccaaggcaggtggatcacgaggtcaggagttcaagaccagcctggccaagatggtgaaaccccatttctactaaaactacaaaaattagccaggcgcggtggcaggtgcctgtaatcccagctactggggatgctgaagcaggagaatcacctgaacccgggcggcagaggttgcgccactgctctccagcctgggcgacagagtgaggctctgtctccaaaaaaaaaaaaatccattttatggttagatttgggggcttcaagccgtatgtggaaaaggctctcttagggcatttggtctgtctgggctcctaagctgcttagaaatgaggtccttatcacagcagatacttaataaaagtgcactgatctttatatacctcttttttcagtcctttttctttttctcagatcgccttttccttctcttacttatcttttcccctatttcttttctctgcgtatggcttaggttagtccttggcggtgcagagacaccccccagaagttgttggaccctgctgcaacctccctgcagcttagacttcatttcttcacactcctgtatttggagcagcgacgctagtgccaggccctcagaccaggagacagttgctgcctcccacagtggcccttggggggcgatattggcagtcccaggttaggcttccacgtccttggctagccttaaggttagctctgaactctactgacctttgctcgctttggatgacaaaggaaatgatcgagtttagagatgggccagaggtgggtggaggggtggctgaaccttccggcttgcgctgtacaagccacaagaccaaataagggcgtgtgagccgcctccgtctgtattaaagttcagagtgcagtgtgcaaaagtgggactcggttttcagagataagctgttacccaaccctgcttgagttccagcagcggaggctgcgaagtctcctgctctgagcagggctgggtctgggggagaaagacctgggcccctgggcttgcttagctggggagaggaaagaaggggggcttccctcaccagcacctggtgactgaacggacccacaaccccacagattttcacaaagggtttccatgactctcccgactaaaatgtgccggccagtgtgactcattagaatgtgtaggaaaggtcactgtttgaggatattcagccagtgggggaaaaaaccacaacgttattttaatgaacgcttttagcctggcttgtttcctgaacattaaggtctagggcgggacttcgagtttggggccttttccagaggtattaacactgtgtttgctaaatacaccccagggaaggagtcgtcgggcttctacgagtcacacttaaaagactggcaagagttggcttcttctgttgtgttcttagcttccaaaatagtagtctctcctcagagccagacgcgcaatgccatcatgttaatgaggtgcctcatgtgcttcaatagccactgactgatggtaccccgaacctgcctggattcctcacctcttcccctgcccatctctccttcccgcagcaaactgctcatcctgcagcagtccgaacctctgcctcattggccctaagcttcctaagggaagggaccatgacttgtattcatgtttatatccctaaaactcagccctctgtttggcacatagtgtgtgcttagtccagatcacttaaatgtacaatgatttcattctctcggagccccgctctggtggtgtgggtccctgsggacccctccagatgcctttctccagccatggctgcgcaggcaccgagaagccgcaggctggttccagctcacagcctctcgcctcaggcccacactgctcctcctgctgtctgccccagggcttgcgattgcccgggggtccccaagcgggctcaactctgaaagattagagagctaacagcctatggagataaatacttccttctttatcttcctgggaagatggacagttgtaagatgattttcttacaactttcagacagtcctgtgggaacacacagccagtgcccataagtagggccacatcagtagagcatccctgcttccctgccttctccatctgtcagtggcttctgctcctggggtcacagtccccaataaagtacacactaagccttcttcctaggggagctgagactcgaatacattcagagccctttaagaagttctctcacagacttatttttgttttcaaaattcaattcctctaaatatatttctgttcctctttcgtctaagtctcattctttttgactgagaagtcagaagcaaaattaaagtttagtgactagggtttttttgtcctgttatacgttgacattccttaccgtgggtgtatctgtgctttctttgctcttactctgaacatgcccaaaaaaactcttgtgttatctttagcatatttcataagccacaattcaggaagttagagaaattgctccctggtgcagagcaacagaactgccgacctctttccactccaattgcggtgaaagtgatatctctctgcctgagctgacgttggcctttaggcttctctaattatttccttaggttagatttctagaaacacagggtcaaagggcacagatattcacatataggcaagttaccttcttcttgagatgtagcaatttaaactcataacagcagtacataacagtgcccctttctctgtgtctttctccaacacagacatcttgctttaattttgcatttatttgattctttctgagaagcagaaggaatatatgttggccgtttgcatttcttcttttctaaattacctgttttctttccttccttccttccttcctttctttctctttctttctttcgagacgaagtctcactcttgttgcccaggttggagtacagtggctcagtctcggctcactgcagcccccacctcccaggttgaggctattctcctgcctcagcctcccgagtagctgggattacaggtgcctgccaccacgcccagctaatttttgtatttttagtagagatggggtttctccgtgttggccagactggtcttgaactcctgacctcgtgatccacccgccttggcctcccaaagtgctgggattacaggcgtgagccactgcgtccagcctattactattattctttttttcttttcttttttttctttttcttttttttttgaaaccggagtttcgctcttgttgcccaggctggagtgcaatggcgcgatcttggctcaccgcaacctctgcctcctaggttcaagcaatcctcctgcctcagcctcctgagtagctgggattacaggcacgcaccactgtgcccggctaattttgtagttttagtagacacagggtttctccatgttggtcaggctggcctcaaactcctgacctcaggtgatccgcccacctcagcctcccaaagtgctgggattacaggcgtgagccaccacacctagctaaaaattctttaataggtctctttaatgttttaagtagtcctagatttcccctgtgaaccatcttgaaagttttgccttttattctcagttctcttttgctggcttcttatcaggaaacaccacctgactgatttgagatgtaaagtgatggagtgcaaagaccacaggtctctgtattcaaaggtctaggtgcaaggtacaaccttaccggatatttcagagcttgtcttttataatttttgagctgagaaggtcaggtgagataaactgtatggactggaattctgatttgagatgtaaagtgatggagtgcaaagaccacaggtctctgtattcgaaggtttaggtgcaaggtacaaccttaccagatatttcacagcttgccttttatcatttctgagctgagagggccaggtgagataaaccctatggactagaattctgaaaggagagcagtatgtcaacaaaggaggattcagcaactgcctgatgcaatctctagttatcttcgtcctgcaccagcagtatatgatgctatctcatccaactccattcttcagatttgtcatctctcctttacttggataaaacctggctggaaacttggcttcagtcctccatatccatctgttttaggcagacttaactcagctttacatctttgcaaacttacccacgcacatcagcatccgagaaatttccatactctttgattaaaattgcagtaaaagtcacaaaggaccttgcttaaaatgaaaggaagtttctaggaactctaagctcagtaactttatgaccattccctgtagagctgcaaaggtctggatttgaaaagtcataagtagcaagggaattgcgccagaatacctgtcttttgctggagcaaatccattgcctggttcatgcctatgtcacataggcagggcaatgccagacttttcttttctttttttaaagacagagtttcgctcttgttgtccaggctggagtgcagtggcacgatcttggctcactgcaacctccacctcctgggttaaagcgattctcctgcctcaccctcccaagtagctgggattacaggcgcccaccactaagcccggctaattttgtgtttttagtagagatggggtttctccatgttggtcaggctggtctcaaactctcaacctcaggtgatccgcccaccttggcctcccaaagtgctgggattacaggtgtgagctacagcacccggccttcttttttttctcttttttttaattttttttttttgagacggagacttgctctattgcccaggctggaatgcagttgctcactgcaacctccgcctcctgggttcaagggattctcctgcctcagcctcccgagtagctgggactacaggcatgcgccaccacacccggctaattattgtatttttattagaaatggggtttccacatgttggccaggctggtctcgagctcttgacctcaagtgatccaccctcctgggattacaagagtgatctgtcccctcccctcccctcatctccccttcctcccctcctcttcccttctctctcttttgagacagggtctcattctgctgcccaggctgcaggtgcagtggtgtggttatggttcactgcagtcttgatctcccaggctcaagtgatccttatgcctcagcctcccaagtagttaggactacaggtgcatgccactgacctggctaattttttaaatttattttttgtagagatgtagctcagaatggtcttgaagccctggcccaagcaattctccctccttggcctcccaaagtcctaggattacaggcatgagctactgcgcccagcccagacttttttgttgttgttgttgttgctgtttctcacccaggttgcagtacagtggtgcgatcacagctcactggagccttaacctctggggctctggcaatcctcctgcctcagcctcccaagtagctgggaccacacacatgccaccactctcagctaattttttttttaatttgttgagacagggtctcactatgttgcccaggctggtcttgaactcctgtgctcaagtgatcctcccactttggcctcccagagtgctgagattacaggtgtgagccaccacacgtggcccccagatattctttaagtgtaaagcttgactactatttgaggcttgacttctgctttcaaattgattttgaattacatacaagtaatttccaaggagagtcagttaacaagataaaattgtggtctttaccatatgtgcattcttttatattctcagccccattagtgcttgtataagtccatgtgtactaagtaaatctcttttaaccagttctttccaactgtgaaaagaagtaaattatatggggctgggcgtggtggctcgcgcctgtaatcccagcactttggaggctgaggcgggcggatcacttgaggtcgggagtttgagaacagcctggccaacatggtgaaaccccattttcattaaaaatacaaaaattagtcgagcgtggtggcgggcacctgtagtcccagctactcaggaggctgaagtaggagaatcgcttgaactcaggagatgaagtttgcagtgagctgagattgtgccactgcactatagcctgggcaacagagcgagactctggctcaaaaaaaaaaaaaaaaaagaaagaaagaaattatatggatttttcagggagcttacaaggataagaaaataggacttggctgggcgcagtggctcacacctgtaatcccagcactttgggaggcagaggagggcgggtcacctgaggtcaggagttcgagaccagcctggccaacatggtgaaaccccttctctacgaaagtacaaaaattagccgggcatgatggcgggtgcctgtaatcccagctactcgggaggctgaagcagaagaatcacttgaatctgggaggcggaggttgcagtgagctgagattgtgccactgtactccagcctgggcaagagagtgagactcaatctcaaaaaaaaaagaaaaaagaaaatagggctgaggcaggaggatcacttgataccaggagtttaagactagcctgggcaacatagcaagaccccatggctataaaattaaaaaaggattaaaaagtagataatattaaaacaccttagatttttcaaagtaatggagctcttttttttttttttttttttgagatggagccttgctctgtcacccaggctggagtacagtgacatgatctcggctcactgcaacctccatctcccaggttcaagcgatcttcctgcctcagcctcctgagtagctgggattacaggcacgcaccaccacacccagctaattttttgatttttagtagagatgtgcttcaccgtgttggccaggctggtctcgatttcctgatgtcaggtgatccacccgcctcagcctcctaaagtgccagcaccaatgtgcccggctggaatggagctcttaatataaattgtacttattagtttttcgtttcagcctataaaatgtacaaatctttctctttaaaaaaaaaaaaacactcctttgatgctgtatgccttgcaagttaacacactttccatctactcttcatagcagagttcttacaagagagatccacgcatgtgcttttcatttcaccattgactcagaagttacatttatgattttatcacaaagaaatattgagagaggcatacagagttatggataaggatgctcattacaacctttttacaatactaaaaaattggaaacaacctaaataattgatgatagggaggctttaaaaaattatggcatctataaatgagaatttggctttgctgcaaatagcagatgacccacaataactgtggtaggaggagggrtgctatctgggaccgtgtgatggctcactccccagagtccttgcagcttggtttcctcctttttcattactctactctgtctggcttcatacctaagattacttcacagaccaagagggcttctcctgttctagttatcagcaagagggactagacaaagaaaactggggcaactatcattcaccaactgtctcttaaggaagcatccaaaaactgacytacatgtttatctagggtagaattgttactatattagagaagacagaaactatgcttggacccaggccttgagctgattagggttgaactttaggcaaagaacaactcagatagttagtctaaaaggagttttttctacatttatctgtttgaaatttcccagcatcaaattttatattttcctatattgaggggaaggggccccattaggatattttgcccttttgcccaatgtatacactttttaacccataatctgttttataaaattgcaatctttcggcctggcgcagtggctcacgcctgtaatcccagcactttggaaggccaaggtgggtggatcacgaggtcaggagatccagtccatcctggctaacacggtgaaaccccgtctctactaaaaatccaaaaacaaacttagccgggtgtggtggcgggcgcctgtagtcccagctactcgggtggctgaggcaggagaatggcgtgaagccaggaggcggaggttgcagtgagccgagatcgcaccactgcactccagcctgggtgacagaaggagactccgtctcaaaaaagaaaaaaaaattgcaatctttcaaacatcttgcttacatgcatcagcccccagtggctggtataattccctttggttcatccaaatatagagtacttctgtcaagcaactagtgcttgttaaaccccctaacacacttccttgcatagggtagaagcacaattacttattgtttatttattttaaaaaattgttcattgacttgagttgtaccatgtaccacctaagaaatagaagaataaggcacaggcctagtcttatattttaagtttagctaaagagacacacaaaacaacagaaaataatagaatactattcaaatcaggtacgaagtggggtagtctaagctatagttggtagaggagttcagtgaaggtttctaaatacaaggaaggtgtgtagtaaagaatttggccttgtccaatgagagatctggtctctcattggcttttgggaggttatctgtgtcatacctgatagcagtgtctttgctctgtgagggaagctcacttggagaaaggctcacaggaacaggtgttgctccacgcctttcttttagtggctccaccccctgatagtgggtgagatcaatcatttgcttatgacacagtcctagacttaagagttggaaggactctcaggcagtcatcaggtgcatcccagaattattttatctttactgatgatgcagctcctgccaggtcacatggaaagcaggggagctagaactcgggttctgtgtcatcctaccccatgttctctctgccacatcacattgcctgctcgtgacactggaccactgtaatcatggacggtactctgtccctgagcttctggggtgaaactggctattaacccttgccatgtctcccttccctgagccttgaatcctgcttgccctgtggtgcccccatgtcccccagtacggttctccccgctgccctctataaccaarcacctggcaggttattgcttttccataaagctggaaaactcttagacagtgagaggcaggtggccagactgctgctgtcctttgaaggtttagggccaagactgagcagcaattgaaagtatccattgaacacctgctgtgagtaagacatcgcctctatcttaagcctttgctctattccaatggaaactacagtttccaggctcccatgtccattggcttctggaggggtttgaccagtagatggcaatgatggatgactaggaggtagcagagggaagaaccaggtatttcccccatcctccaccctaagtggcatgtccatcagcaggttggtgttttccctgacatctagctagttctcctgacatctagttcccaccactgctccccttccatggctctgctgtcccctatcttagaggtggtggtgcccttctgctgtggccagtctctgcgttgtttcactgtttcctgtttggcctctcagctcttcccatacagtgggtaaacaggtctctatattaaattccttctgaaatacctggtggtctccattttcttggttagaccttgactgattaatggctcatgtaacatccgtccatcgggggacttatgataggttggagagtcaagaattaaatatatgcagcctgtaatcccagcactttgggaggctgaggcgggcggatcatctgaggtcaggagttctagaccagcctggccaacatggtgaaaccctgtctgtactgaaaatacaaaaactagccaggcatggtggcgcacgcctgtaatcccgattactgacaggctgaggcaggagaatcgcttgaacccaggtggcggaggttgcagtgagctgagatcatgccactgcactccaacctaggtgacagagcaagactccgtctcaaaaaaaaaaaaaaaagtatatatatatatgtatgtaaaatactagtaaaataaaatgtagagattccatacatgtactaaaaatcactgagttattagctgggcttggtggctcacacctgtaatctcagctacttgggaggctgaggtgggaggatcacttgagcctggaagtcaaggctccagtgagctgtgattgtaccaccgcattccagcctgggtgacagagcaagactctgtctcaaaaaaataaattattagccaggtgtggtggctcacgcctgtactcccagcactttgggaggccaaggtgggtggatcacgaggtcaggagtttgagaccagcctggccaatatggtgaaaccctgtctctactaaaaatacaaaattagctgggcatggtggcacatgcctgtaatcccagctactcgggaagctgaggcaagagaatcacttgaaccggggaggcagaggttgcagtgagctaggatggtgccattgcattccagcctaggcaacaagaccgaaacaccatctcaaaaataaataaataaaataaaatattcaggagaaaaaatgaaaaatgaagagtgagtagattagactagtgatctccaaacatttttatcacactcccctaatggcaagaaacaacatttgagcttgcacctccatatttatgtacttatttattcaaactgtgtacatgttaaaccctgttggtatatgatgccttataaaatagctacaaaatataaatgtaaacagaaaaacaggtaaatagaagtcctggtgattcattgctttacctcaatgagtcatcttacacatctcctgtggtgcctaccccactttgaaatcataaaccgcttgtagaagtggccatcaaagagctctgcaagggactgcaagaaagaaggactgggggccaggtgcagtggctcacacctgtaatcccagcactttgggagactgaggtgggcggatcacaaggtcaggagtttgagaccagcctggccaatatggtgaaaccccgtctttactaaaaatacaaaaattagctgagcatggtggcaggtgtctgtagtcccagctactggggaggctgaggcaggagaatcccttgaacctgggaggcggaggttgcagtgagctgagattgctccactgcactccagcctgggcaacagagtgagactccatctcaaaaaaaaaaaagaaaaaagaaagaaagactggggagttctttcttttttttttaaaggagggtttaaattaggctaatgcagcaataacagccacacttttgatgtttacacatttctttacagttcttgaagtctcgctctgttgcccaggctggagtgcagtggcacggtctcggctgactgcaagctccacctcccaggttcacaccactctcctgcctcagcctcccaagtagctgggactacaggcgcccgccaccacgcccggctaattttttttttgtatttttagtagagatggggtttcaccgtgttagccaggatggtctcaatctcctgacctcgtgatccgcccgcctcggcctcccaaagtgctgggattacaggcgtgagccaccgttccggccctttttacagttcttaaatgctttctgacctgtgttatctcattgactctttcaaataatgagaaaggaagtgaatcaaaataggagatagattggggaaaacttgaacgtgtgaccaagaggagtttggacttgatcataaaagtaatgatgctttatcagatgtgtcacatcacagagcagatatttacagtccaaagtccctccctaaatgattggcctcacccacaatgactgggtggagccaccgaaagaaaggcatggagcaacacttcttcctgcatcgcccctcaaaagagcagatcccagttctctgaagataaatggaaggcagccatgaacttccccctctttgaggtttatctttcagcaccttagcacctcagaacaacagagaattagtaggcttagcctactatcctcctatcctttctctcgtgtgctaaagttccatacaatattactggtgtattccctctccaaaatgatgccttaatacatttatgtgaacctctcagccaggagtatgtatgtagctattgtcattccaagacattttctctgttcccattgtccatttctccttcagctgcgtgagctcaggggcttatgttttacacactatattcagctccatttccaggaaacaaaactgaactttgtcctgatcccgctttatccctttctcctgatcctgtccctcacctgctgagctgtctgtcctgctcactgcaggagcactatgagaaccacgtggagtggccgacaggatagggctttgaaaagtacaaagctgccctctgtagaaaacaccctaaagcagaggtycccaacccccaggctgcagaccagtacaggtccgtggcctgttaggaaccaggcagcacagcaggaggtgagtgacgggcaagcaagcattactgcctgagctctgcctcctgtcagatcagcagtggaattagattctcataggactgcaaaccttattttgaactccgcgtgcgagggatctaggttgcacgcccctatgaggatctaatgccccccacccctgtccatggaaaaactatcttccatgaaactggtccctggtgccagaaaggttggggaccactgccataaggggttggcagatgaaccagctgaagcaaaggaaacaattacattatttattgctgaggctcatgttgtttttgtgctgaaaaacctccagtgactctcctttgcccaaagtccgaaagggggccagttaatgacctttgtccatagggaggtgataacagcctgcctggtagggagcagagcccatgtcctctcagtagcattatgggtgttgctgtaggacctgacccaaagagagataggtatcagtttataagattatgaataatattttcaaaaaagggggccaagatgaggccttagtctcatatcaggtgacaccatagatcaaagcacagaaaagagacaggaaggatttcagcaggttggagaaggagataggcctgtgatgtggccaggtggagacacagataagttgaagtttattctggtaaagacctttgtacctgacatgcagcaagtcccagtcctgatggagggaggatgyagccagctccctagtgctaaagcattttggctttgcaggcaaaaacctgcattcaaaatctaactataacagccttgcaaacaagctacttaacttcatcggtaaaggctctgtcaaaggccaggtgcagtggctcacgcctgtaatcccagcactttgggaggctgaggtgggcagatcacctgaggtcaggagttcaagaccagcctggccaacttggtgacaccctgtctctactaaaaatacaaaaattagctgggtgtggtggcgggtgcctgtaatcccagctacttgggaggctgagcaggagaaccattcgaacccaggagatggaggttacagtgagctgagatcatgccattacattccagcctgggtgacagagcgagactctgactcgggaaaaatacataaataaataaatacaaaaattagctgggtgtggtggcacgtacctgtaatcccagctactcaggagactgaggtgggagaattgcttgaacccgggaggtggaggttgcggtgagccgagattgtgccactgtactccagcctaggcgacagagcagtaatcccagcactttgggaggccaaggttgggccaatcacctgaggtcaggagttcaagaccaggctggccaacatggcgaaaccccatctctactaaaaatacaaaaattagctgggcgtggtggtgggtgcctgtaatcccagctactcaggaggctgaggcaggaaccccggaggcaaakgttgtagtgagccgagatctcaccattgcactccagcctgggtgacagagggagactccatctcaaaaagaaaaaaacaaaacaaaacaaaaaaaacctctgtcaaaagatgttcatgaggttaatgaagtaacatatctttgtactttttattaaagtactattactaatattctcataaagtgcatatcatcatgccttgtgctcaagttcatttttaacacatttgtctccccaacttgtggacagagccttgtctcattgatgttgtttcttaccctcagcaacaagcataaagctccaaaagtgtgttgtgtggaattatgcattaatttctagttgtttcatgtttgtaaatctcaccttaactgaaatctgctgaagcttaagggcagggacccttacccccaatgtaactatcataaaactgggcatgcacctactggagcttagggagaaggttgtgcctgattagaaaaggtgttcaagttgtgcttctctcttgtagggatttcccagatgacccaggcatgcagtgggacacagagcacgtggccagagtcctccttcagcacatagaagtgaatggcatcaatctggtaagggggcagctccctgaatggaaaacctgaggtcttggtcccattcacaccaggtggtttctgtaattttttctgtggccaccctcccacttccagtccttctccagggccactctctaaggaggccagaacttccaatgctcaccattaaacctactgaagaacaaacacaccttttgatatctttacgatcttgtgtgagactgaataactaaattatcagtgctcagatagaggcagaagttttttctaaactgtgtcctccttaacaccctcaagcccccgcctttgtcctgccatctaaaaattcaggtcccccagagcctgcccagtgattctcatttatacagaacttgacctcaccttttaccaagcattttcacagagtatcattttaactttaaaagtaaaatttgtgactgggtgtggtggctcatgcctgtaatcccagcacatcgggaggccgagttggacggatcacctgaagtcaggagttccagaccagcctggccagcatgatgaaaccccatctctattaaaaatacaaaaattagccgggcgtggtggcatgtgcctgtatcccagctacttgggaggctgaggctcgagaatcgcttgaacttgggaggcagaggttgcaatgcgcaaagattgtgttactgcactccagcctgggtggcagagtgagactctgtctcagaaaaaaaaaaaaaaagtaaaattatcagtttacattgaagaaactgaggttttgcagaggccaagcagcttgtccaaggtaaacaagtggtggtgaagccaggatttttaagcattgatttcttcattccaaaaaacatgagaatgcattcatacccactaaggaagaaaatttttgatgcaattagagcaatagcagagatttgtatttactgcaatggtggacaagcctagcaacaccagtctcagctcttctaggatcagcaggactgcttagcccatagtcaattttaaagctgccaaggaggcttactgtctaccactcaaaaaatatataataatccttcatgaggtaatatctaaaattccacatttaaagcctcaccatttggcttaagttttgattaagttctcatgaaaacatgaatcctgctggcagagaaacatattaggcttttttttttaattttttttttttaagacacaggttctccctctgttgcccaagctggagtgcagtggctgcctcagcctcccaagtagctagaactataggcacatgccatcatgtctggctaatttcttttttcttttttttttctgagacagagtttccctccatcgcccaggctggagtgcagtggcgggatctcggctcactgcaacctccgcctsccgggttcaagtgattctcctgcctcagcctcctgagtagctgggactacagacacgtgccaccacgccaggctaatttttgtatttttagtagagatggagtttcaccatgttgatcaggctggtctcaaactcctgacctcgtgatctgcctgcctcggcctcccaagtactgggattacaggcatgagctaccacacccagccaatttttaatttttttttttttttttgagacagagtctcgctctgttgcccaggctggagtgcagtggtgtgatcgccgctcactgcaagctccgcctcccgggttcacgccattctcctgcctcagcctcccaagtagctgggactacaggcgcccaccaccacacccagctaattttttgtatttttaatagagatggggttcccctatgttagccaggagtctccatctcctgacctcatgatccacccacctcggcctcccaaagtgctgggattacaggcgtgagccaccacgcccagcctaattttttttttttagagacaggatcttgctgtgttggccaggctggtcaccatctcctgggctcaagctgtcctccctcattggcctcccaaagcactgggattacagatgtgagccactgcatcaggccctgagagcagattttcattgatatattcattggactgtttctgttctctaatgacagaaatacaactgaaatttagtacacacaggccaaaacaggcacctaatttgctcaccctgagtcacctaaaagctgagctgcagatgggcctcaggtaccctgaccctaccacgactcatctccatctttctctgcatgttggttttattccttttcctggctggaaaaatggtcaccagcagcttgcaggccccacactccctgcctacccttcccagaggatctgagcatgaaagcggtaatgttagatccatgggcttaggaataatgcctagctgtgctgactggggcttgccttggttctcttactcctcctcttcagcccacacagtttgaagttctcagagcctccacagcctcgatatgtagacagagctgaggttggaggttgtcatggccagcctgaagtactccctggcacctcattttccatgctagtgccttcccagtccctaaatactctctgtcctcccctacttcagtgcacgagaactactggtcttccaaattgctcctgctgtagggtactcttatctttttttctttttcttttttttctgtgagacagagtctcgctctgtcaccaggctggaatgcagtggcgcgatctcagctcactgcagcatccaactccctggttcaagtgattctcctgcctcagccttctgagtagctgggactacaggtgcgcgccaccacgcccagataatttttgtatttctggtagagatggggtttcaccatgttggccaggatggtcttggtctcctgacctcgtgatccgccttccccggacttccaaaatgctgggattacaggtgtgagccaccgcacccaggctactctcatctttttaaacttggaatccaaaatcctctataatctgacccttactgaagtcctgaacactggtgaacaacgttggtctttgccgaggggccagatttctttttcagaccatgttgcagctgaccttgaccctgagtatctgagggaggagctttggggcacaggcagctctgtgtgccattcttgctttcagaagagtctcccatgtttgggtcccagaaaagtgatctgtggtccaggcacccctccagaccttcttctcaaagaagagctaactttgatgagccctttttgaggctccggcagtatttgctgtgtgtactgcaacatatgttgctgtttattcttaaaagtgcagaccacgtcttgcaaactagactaaggcctgtgaaggccaaggctgtgcctggtatctttatatctccaagaactagagcaggcccctggacagtgctccttaccaaactgctgcagctgttaactgccacctccctgcctggaagtctttcctgtggtgctgagctgctcacacttactcaagtgagtcgacttttattgtcaagagaatcttcaattgatttaattgctataaacaaggaaatcgtataaaacagctccttactaataaatttctccttttttttttttcctgaaatgaagtctcgctctgttgcctaggctggagtgcagtggcatgacctcggctcactgcaacctccgcctcccgggttcaagcgattctcctgactcagcctcctgagtagctgggactacaggtgcatgccaccacgcccagctcatttttgtatttttttttttctttttttgagacagagtcttgctctgtcgcccaggctggagtgcagtggcgtgatctcagctcactgcaaactctgcctcccgggttcacgccattctcccgcctcagcctcctgagtagctgggactacaggcgcccgccaccatgcttggctaattttttgtatttttagtagagacggggtttcgccgtgttagccaggatggtctcgatctcctgacctcatgatccgcccgcctcggcctcccaaagtgctgggattacaggtgtaagccactgcgcccggcctactaacaaatttcttgtgacacacttgctattaataaggaaactcaagttgacagtacagttgggaataatttctctggcctgcacttagtgccatagtagaagtataggatcatgctaacaccgtkgctagtgtagstataactggccatcattcgagctgagcatgggtttccattcagcccagaagtttcaactrcacacaagagatgatgaagcagcaacacagaagcacagacagaggtgtggagcacagtctaagccatggggagagattttctcacctgggctgcaccaggatgagagcataagctctccaccatcatccaaagcaaagctggctctgcagccatcaatgcaggaaactgggttctgtctggtcccagctctgtagtactgcaggaacatcataaagaccataaggaatggcagacaggacagagttttgaaaagtacaaagctgggtgggtgcaatggctcatgcctataatcctagcactttgggaggctgaggtgggaggatcacttgaggccaggagtttatgaccagcctgggcaatatatcgagactccatctctattttttaaaaaataaaataaaataaatgttaaaaagaaaagtacaaagctaccatccttggaaagcagcctaggggggtagtagtgtcttctctgggtgttaagcaggctaggtcctgggcctcaacccctctacctcaactttcattcagtaagtatttattaagtacccaatatgggacatttgctttaggtggtgaactgggaatacaacagtgagccagaagcacttagtccctgctcccatagagcaggatgtgtcagtacagcactattgcgcatttgagactggataatttgttgtgggggttggccttgtgcattgaaggatgtttagctgcatccctggccactacccactagatgtcagtagcaatccccctcctcagttgtcacaatcaaaacgtctctaggccgcaagcagtggctcacacctgtaattccaacactttgggaggctcaagcagggggtggattgcttgagaccagcctgggcaacacagtgagaccctgcctctacaaaaaaatttaaaaattagctaggtgtggtagcatgcacttataatcccagctactcaggaggctgaggctgaggtgggagaatcacttgagcctgggaggttgaggctgcagtgagcatgatcacgtcacgtcactgcactgcactgcagcctaggtgacagaatgagagcctgtctcaaaaaaacaaacaaaaaaaacctccagaagttaccaaatgaccctggggcaaaactatcctaggtgagaaccagtgtcttagaaaccagagcagccccacagttacctatttattggggtctgggtaagattttatttgaacaaatacttttgcactttaggaaaaaataaaagtggatggagttttgtaaagaatgacaggtgccrttgtcatgtacaaatctgcaaagttcagagagctgaatacaatttagcttaaccctacttgcaacagaaagggggaaactacaaggtacaggatgagagaaaaaacaaagactggagaatttcaaaagtgatggagctgaatttcatgtgaccccaaatccactaaccaagggactgcctgccctccagcacccttctgatatccatccagccagagtgctagccagctccacctgatggcaacagcctgggagttgagatactctagggttttctgctgtacagttttcttttttgtagcaagatggggttcttgttcttgtcgcctaggctggaatgcagtggtgctatcatagcccactattacatcaaactcctgggctcaaatgatcctcctgcctcaacctcctgagtagctggggctacaggtgcacgctagcaagcccagctaattttgttgttgttttttgagatagagtctcactctgtcaccaggctggagtacagtggcacgatctcggctgacttcaacctccgcctcccgggttcaagcaaatctcctgcctcagcctcccgagtagctgggactacaggcacgcgccaccatgcccagctagtttttttgtatttttagtagacacggggtttcaccaacctggccaggctgatcttgaactcctgacctcgagatccacccaccttggcctcccaaagtgtcgggattacagacgtgagccaccgcgcccagcctcgctgtacagtttttaaacactatttcttcacttaaacctagcaaggaaagtagagctggcattacttttcctgatcttacacatgaggaaaccaagacattccatgttgaaataacttccagtagtaaagttttctgacttgcccaaggtgctgtaattaactagagttagagataaaagtagactttgatctcccccaaccaccaccccaccacccaccttgttctgcatggaagggtgggatcagaaccaggtgtttgagttatacgatctttttttttttttttttttttcttgagatagagtttccctcttgttggccaggatggagtgcaatggcgcgatctcagctcaactgcaacctctgcctcctgggttcaagtgattctcctgcctcagcctgccaagtagctgggattacaggcatgcgccaccaggcccagctaattttgtatttttagtagagacggggtttctccatattgatcaggctggtctcgaacccccracctcaggtgatctgcctgcctctgcctcccaaagtgctgtgattacaggcgtgagccaccgcacccggctggcttttaaacaatatcaacaccgaaggggtgagattcttagagtgacakttcagagacagtcaggagagtaggggagatggaaacacctgctactaatggtaaggctcggctgcgactgcccagccctgggaaagcctttctctgcagagcacttgatcccacggaaacttggcagtaagagctttaaaaggaaagggagagggaaatgaaagcgagagggttctgtcagggagctgctcggttttaacaaaggaggccattcccatggcacaacccttctttctgttatcaggagaccatgttgacattaccctgaattcacctaaactggtgctgactcttcatgaggttcccaatgattcctgaatctcatgatggccagaagccggtctcctcatggccatggcactctgagaggatgtttggtgactggaccttgtgttttgtggttgtttccactgtctccacttcttagatttggtcctcttgctaggccatagggtgtgccagtgcagtaaagtccagggcaccttggcctaggtgctaactccttcaaagtttctgctttgtttccacagctgcatgtttccagcctgtgctgtgcacgctgggtgggagagggcaacttgaatgcaataactacacctarcacagttggcaagactctttctttactatcatgaaggaaaccacatttaaaaatgtgtccccttatgtatcctctgggcattgcatatagttctgtcatcaaaggtaagaatgattttaaccccagtgcctggtacagagtaagtgctcagtaatgtcattagctgttattacagctattaccacaacctcaaaaaaaaaagtttggctgagcacagtgtcttatgcctggaatcccagcatttcaggaggctgaagtaggaggatcgcttgaccccaggagtttgagaccagcctgggcaacatgacaagaccttgtctttacagaaagaaatttttttaagtagctgggcccggtggcacgtgcctatagtctcagctacttgggagaggaagacaggatttcaaggagcccaggggttcaaggttacagtgagccatgatcacaccattccagcctgggcaacagagggagaccttgtctcaaaaaaaaaaaaaaaaagcctggatgcagtggctcactatttttaaaaagtaaaataaaataaaataaattttaaaaagaaaagcacaaggctgggtgcagtggctcatgcctgtaatcccagcactttgggaggctgaggcaggtgcatcacgaggtcaggagtttgagcccagcctggccaagatggtgaaaccccatctctactaaaaatacaaaaattagccgggtgtggtggcagatgcctgtaatcccagctactcaggaggctgaggcagggaactgcttgaacccgggaggaggaggttgcggtgagccgagattgtgccactgcactccagtctgggtgacagggtgaaactccgtctcaaaaaaaaagaaaattacaaagctgccatccttggaaagcagcccagggggatagtagtgtcttctctgggtgtcaagcaggctaggtcctgggcctcaaaccctctatctcaactttcattcaataaatatttattgagtacccaatatgggacattcactataggtggtgaactgggaatacaacagtgagccagaagcacttagtccctgctcccatagagcaggatgtgtcagtgcagcggcactattgcgcatttgagactgtaatcccaaaatgcctgtaatcccagcattttgggaggccaaagcaggcagattgcttgagcccaggagtccaagaccaacctcagtaacatagtgagaccttgtctctactaaaaatttaaaaaattagccaggtatggtggcatgcaccatactacttatacactaatttaaaaaagccactgcatccaggctttttttttttttttttttcgagacaaggtctccctctgttgcccaggctggaatggtgtgatcatggctcactgtaaccttgaacccctggactccttgaaatcctgtcttcctctcccaagtagctgagactacaggcacgtgccaccgggcccagctaattaaaaaaatttctttctgtaaagacaaggtctcgccatattgcccaggctggtctcaaactcctggggtcaagcgatcctcctacttcagcctcctgaaatgctgggattccaggcataagacactgtgcccagccaaacatttattttttgaggttgtggtaatagctgtaataatagtgtataagtagtgtattaatagctgtaaaagtagtgtcttcccagctacttaggaggatgaggtgggaggattgcttgagcccaggaggtcaaggctacggtgagctatgatcatgccactgcactatagcctgcatggcagagcaggaacgcttaaccatctcatagataactagattagtcttcttctagggacctaaagrgcaaagcgataaagcgagcataaaagcagtttgaaaagtaagtgacagaagcatgaaaagcatcgtttttgaattagttcttacttggattccattgatgagcacaaaacagtaatctggttcaggatagaaatataaacattaggccgggcacggtggctcacacctgtaatcacagcaccttgggaggccaaggcgggtggatcaccaggtcaggagttgaagaccagcctggccacataacgaaaccccatctctaccaaaaatataaaaaattagctaggtgtggtggcatgcacctgtaatcccagctactcggaaggcggaggcaggagaattgcttgaacccrggaggtagaagttgcagtgagccgagaaattgcgccactgcgctccagcctggccaacagagcaagactccatcttaaaaaaaaaagaaagaaagaaatataaacattaggccgggcacggtggctcacgcctgtaatcccaacactttgggaggccaaggcaagcggataactttagtcaggagtttgagaccagcacagccaacatggtgaaaccctgtctctactgaaaatacaaaaattagccaggcatggtggcacgtacctgtagtcccagctactcaggaggcagaggtgagagaatctcttgaacccaggagacagaggttgcagtgagccaagatcgcaccactgcactctagcttgggcaacagagtgagactccatctcaaaaaaaaaaaaaaaaaagaaagaaagaaagaaaaaagaaatataaacattaatcattagaagactttcttgaattatggcattctgttgttaaaattcttccattacccaccacttctgttgactttgtcaacatgttaataaattgaggctcatggtggtaactttaaagttacaggatcctaaaatgtcttctgaattattaaaaagtgtgtgtgtgtgtgtgtgtgtgtgttcagtgccatgaacagtgaagttaactatgtacttatcttttcaaataagggatccagtaatgactctcaagatgatccttctaaccagagtgtttgcttgcctgaaatacgatattccctcacagatgagctctccagaccccaggagaaagaataactgatcgaaactcatgtacttggttggtagctgtcagaataagagtgcaggtcttctgattctttttttttgagacagagtttcgctcttgtcacccaggctggagtccagtggcgtgatattggctcactgcaatctccgcctcctgggttcaggcgattctcctgcctcaacctcccaagtagctgggattacaggtgcccaccaccacgcccagctcatttttgtatttttagtagagagggtttcgccatgttggccaggctggtcttgaactcctgacctcaagtgatctgcccgcctcagtctcccaaaggtcttttacacagtgcttcttcctgcagcgtagcacgccttctcacatagaggatgcttgtaaagagcgtggactgtggagtcagaaagatctaaaccccaagaacagctccaccactcagtggcaaggtgatcacagctttggcctctgcttcctgaacttcctcaggtgtaagatagggttaatactatgtctttgctcaataaatgttagccactcttattataacagagggcttgctgtacatgcagtcattatgctttacagtttaaaatagaaagaccaagagcgaatcccttcccagcccattccaatcccagttccaggttccttcatccatgcaggatggtcacctttccttggggacagcttgcctcttttcatcacccctaatcaatcattctatcctttcttcagtccttgttgtcgtttttatatttcttttattatttgagttagccttattattattattattcaaattattatttgttttttctttttttttagcaattattattatcatttatctcagaaaatctctatgacaattgtgtgaagtacaattatgattacatatgagataattgcaccacagacatgttatataacttgcaaaaagccacaaacccaataagtggtaaagcccaaagcacagaggttttctttcttttttttttttttttttttttttttttttttttttgatcattcttgggtgtttctcgaagagggggatttggcagggtcataggacaatagtggagggaaggtcagcagataaacaagtgaacaaaggtctctggttttcctaggcagaggaccctgcggccttccgcagtgtttgtgtccctgggtacttgagattagggagtggtgatgactcttaacgagcatgctgccttcaagcatctgtttaacaaagcacatcttgcaccgcccttaatccatttaaccctgagtggacacagcacatgtttcagagagcacagggttsggggtaaggtcagagatcaacagcatcgcaaggcagaagaatttttcttagtacagaacaaaatgaagtctcccaggtctacctccttctacacagacacagcaacaatctgatttctctatcttttccccacctttcccccttttctattccacaaaaccgccatcgtcatcatggcccgttctcaatgagctgttgggtacacctcccagacggggtggtggccgggcagaggggctcctcacttcccagacggggtggccgggcagaggcgcccccaacctcccggacggggtggctggccgggtgggggctgcccccccacctccctcccggagggggcggctggccgggcgggggctgcccgcagccccccacctccctcccggacggggcggctgctgggcggagacgctcctcacttcccagatggggcggctsccgggcggaggggctcctcacttctcagacggggaggccgggcagagacgctcctcacctcccagacgggggtcgcggccgggcagaggcgctcctcacatcccagatggggcggcagggcagaggcgctccccacatctcagacgatgggcagccgggtggaggcgctcctcacttcctagacgggatggcggccgggaagaggcgctcctcacttcccagactgggcggccgggcagaggggctcctcacatcccagacgatgggtggccaggcagagacgctcctcacttcccagacggggtggcggccgggcagaggctgcaatctcggcactttgggaggccaaggcaggcggctgggaggtggaggttgtagctagccgagatcacgccactgcactccagcctgggcaacaytgwgcactgagtgaacgagactccgtctgcaatcccggcaccttgggaggccaaggctggcagatcacttgcggttaggagctggagaccagcccggccaacacagcgaaaccccgtctccaccaaaaaaatacgaaaaccagtcaggcgtggcggcgcgcgcctgcaatcgcaggcactcggcaggctgaggtaggagaatcaggcagggaggttgcagtaagccgagatggcagcagtacagtccagcttcggctcggcatcagaaggagaccttggaaagaggggagggggaggggggggagagggagagggagagggagctatttgttttttctttaattcatttgtgtagaaatgaaatgttggaatacagactgagcttgtagttaataaacagatattgatatagctgtgaaaatggaaacagaggcaatctatgaataaatacactttttccatgaactcaaccccaggacacggtggacattgtccttcaaagctttttttgccctcattatggcatgagaaaaagagaaccagtaattcaggctgtatctgcataaacagagttcacttagaagctagccaggaattctaaatgtgctaataaatggctaaaccaataagcaacaaagatattctgaacccaagttcctatcatggctgaattccactctgctccactggctaggaacaagagtaaaacatcaaaccctggaaaacagtctctatgtggtcaaccacagcactagctacacaccactgatctgctcagaagtcacttcagatagatgctgcatttgaaaagtttcagggttctgttctctccttcccaagggaaggagacagctccattgaagttgaggtggtggagaaggcattcagtgaaaaccctgtgtttctctacaggtggtgactttcgatgcagggggagtaagtggccacagcaatcacattgctctgtatgcagctgtgaggtatgattctccgggtgatggatgtgggggagggtttgtttatttgattagggctcatgstttaaagtctaaagcactttcccacttgttatctgagcccatgaaactcactgctggcttatcttctagccctttttggccatgttgctcactgcatctcaccatgtcctctcgctgagaaatctctctcaagtcctagtacgaatgctcgtctcctaaacagctgaattcttttttatacactgaatactgcgaatggggtaattgactttattcatctcttttctgtggccacaggaagcttgagggccaaatttgcaagccctgtggcactggacaagactttaaggaatgagtgctgtcaatcagtgtgcctccaccttcaccatcttcttccccttactctcacttccgtcatgtgttttatacaactctcaaatctttcttggagaaggaggatatacatacataatatgaaatgtgtttgttcttcacagtcacccgattttactgatatttatttgcattttaccaataaaaagaaaatgcaagctcaaaggtattgagtgacatagagtcatacaaacatagatgtgtttcctgtcccctagcaaagtgcttctcctgggcccctgatcagtggtgtggcaggcctgtcccagctactgaggaaggaaagaagcaacttgaagggaaggacttatttaataaccttcttctaaacatgcttaacactcagactgaagcaatgcaatatgtaaagttggaaatgacctcaccaaccattaagtccaatcactgggaagtggtttgcccagcaccacaaggttaaactatggcagaggcagaattcaggaatcctagttctccattcattattctgtcagatgtatgtgaagaccaatccaaactgaagaccctccttgtccttaaattttacatcacttggtggaagatgctagaattttacccacatactctttctaggcagatttccctgtttccttgactatggaatgaggggaggctagactgttctccctgtaaagactattcggttcctggtccagccagcagccacagctttagaagagacgtgctcctagtcgcattaggtcccttcaaattcaggaaagaaacattccctggttacagtctgaaatacaaatttttttgatgatatatggaaaaatgaggcagccccagagtggtctttccaaccacatggttactctgaggccttgagcttccaagactagcatggacagcaagccccatggagaactggaaaaatggtcccacctcattctggatgcacactgagcctggtgatttctctccgagaatttacactgcaccagagaaaggatcaggtcaggtctattgcaaacaaagagtacctcaacaggcagggggctggggcacttgagattgagtcacctggtcccattcctggtccagtcaccactgaagtggagaaaatagagaaggcgtcattctgggcagagaaagaacccaaggggacaactctgtgtagatagaactgcctggggccattttcctcagaagaggctggagtgccacaggctctcagcacgaaggagggccactgtgcttcagataaaacaattcatggacatgccaccaatctgccacaacctttttccccacagtcatctcttgcctgctaaattcgttagactcacgttagtcctcagccaccttgaaccttctgtggcatctggccctgcctgtccstcactgcaatgctgctttgacttatatggcaccagcttgccctcctcactctggcctttctggctacttctcattctcttcccggcttccctcccaccagtggccccttggtccccctgtccccagggctcactccccagtcctcctcagcacagcttcycctgtggctttaagggctataagctctacttccagacagcgcctctagctcactgctttccctggacatcagaatatccacagggctttgcccagagtacaggacaagccacttcattctcaggatcccagaaagttttttcagtcttttcttttctttctttctttctttctttttttttttttttttttttttttttgcgacagagtctcgctctgtcacccaggctggtgtgcagtggcgtgatctcagctcactgcagcctccgcctcctgcctcagcctcctgagtagctgggaactactggtgcatgccaccacgcccggttaatttttgtatttttattagagacggagtttcaccatattggccaggctggtgccgaactcctgacctcgtgatccgcttgcctcggcctcccaaagtgctgggtttacaggcgtgagccaccgcgcccggctcctttttcaggtttttctacctctcaggctctgccaggcagtcagttccatgaatttgtcaattgtctctcaacttctcttgtttaacccctgctcccaagagtctctgttcatatgtgtgtctgtgtgttgctggggctaccttcccaatccttctctgcccccagctttctaaacaacaaagtggggaagagacttggagctcattgcagttgacactcccctcctcttaaggtggcgagcacagaatgacctgcactgtcagaaggtaggcgtagggaagctcagaaaggagaaaggaaatatcagggaagagctatcagttagcattgtaaaatattcccccatcatactcacattacacttccaagagaaaaactatgaagagtccagcacagttaccttcattctctaatgggcaaagcttggaccagagtacttcacaaaccacagaccagcctctggattggctgtccctagctyaggtgcccatcctggtcccttcagctgttgccagaggtatgggatcctggaaatctatacagtgatttatgcaaaagaaaccacctggagactcacatggaggggaccatgggcatggcagcctttcctctgaaggcscctcctgttacctacaaaggaaatgatccttactcctctcactcttgtcctatccctcctccagggccctgcactcagaagggaagttacctaaaggtaaggcttrttccttttgcaaagggccacaagatactgtccctctgagaaacttatgagggggaaatttgcaaatccacagagagctgccctcagccgagcagaggcagtggttggggaggccgccacactcttcctgactcacctcaaggtacctggcaggttgtatctaccagcaagtgcctgcctgcagggccacctctggatgagtggggaggccaggtttgcccctcaacctgtctagctttttcacagggtggatgttttacacctctggtattcttccagtctgaactcaatcccatcccccaaccaattaggcaggttgtaaatgactgctgggtgcttgatgaaccaatctgcctgagttaggaactcttcctaacccacataaagtatttgaccctacctgaccatttactgcatgacccccatgcttagcctctctggaccagtttctggtcwgtcatacctcaccggcgcaatacgaagattcaatgaatgaaaacgtaagtagtttgtgccctttctatgtgggatgactgaaaggagcttaccaagccatgatgactttggaacatgactatagtttgtttgattcttatatcaatcctgtgagacaggcaggtctcacactatcaacaccaatttacagattagaaaactgagactgagagtggttaagggactttgccaagtctgtcaattcttgactgacagagctggaaccaggtctctaaactcccaatacagtaattcctgtctcctttacttcctttggctttgaggtagccagatctcaacctctagcagccaacctttttctggtagggcacaccgcagggtagagggtagccagccaggtcttctatggcccttttactcgttctagctgcaagaatcatgggcacagggcagctttagtgccacagaaacacgtggcaatgctgtggccactgtcctgccctgccctgagccacagggtagagggaggatgctcaggggaaaatctggctggaggcctcaaggcttatcacttcaccctgtctcctctccatccagggtgctctgtgctcacgcttcagtctgtgaatgtgctgcgcaagtacatctcccttctggatctgcccttgtctctgcttcatacgcaggatgtcctcttcgtgctcaacagcaaagaagtggcacaggccaaggtgaggaytgtaaattcctggacaccccaactcagatccctgccccagaccccctgtctcctcaaagcmccacctctgcagaagccctaactgaaggyttttcacagtggttcagcacctgtccctgagaattagggctaggccagctagatcttgggaggcatagatttttcaatgactttagccttttttttctaattataaaaataatatatgctttttctaaaagtaaataacacatgctcattgcagaaaatcttgaaaaacataaaagcatcaaaaagaaaataaaaataagaacaattacctgcagtcccaccaatcacaggtaatccttgttaacatgttgggctacatctttctactctttttttttttttgagacggagttttgctcttgtcacccaagctggagtgcagtggtgcaatctcggctcactgcaacctccgcctcctgggttcaagtgattctcctgcctcagcctcctgagtagctgggattacaggcaccgccaccacacccggctaattttttgtatttttagtagagctggggtttcatcatgttggccaggcttgtctcgacctcctgacctcgggtgatccacccacctcgacctcccaaagtgcagggattacagacatgatccactgtgcccagccctactctttatatatatataatgtgtatgtgtatacacatttcaaatgggatcacacagtgcctatttaaaaccagctttggccaggtgtggtggctcatgcctgtaatcatagcactttgggaggctgaggcgggcagatcacgaggtcaggggttcaagaccagcctggccaacatgttgaaaccccgtctctactaaagctacaaaaattagccaggcgtggtggcatgcacctgtagttccagctacttgggaggctgaggcagaagaatcgcatgaacccgggaggtggaggttgtggtgagctgagatcatgccactgtactccagcctgggtgacagagaggattctgtctcaaaaaaaaaacaacaaaaaacctgctttaacaatacgttatgggctgggcacagtggctcatgcctgtaatcccagtactttgggaggccggggtgggtggactgcttgctgggcaacagagcaaaatcccatctctacagaaaaattagccaggcatggtggcacatgccagtggtcccagctactcgggtagctgaggcaggaggatcacttgagcccaggaggtcaaggttgcaatgaaccctgatcrtaccactgcactccagcctgggcaacagagccagaccctagccaaaaaaaaaaaaaaaaaaaaaaatcaaaactatttattatgaacattttctcctatttcatttagtattcaaataccaatggctgccaattacgccactgtatgtatataccataagatatatcacgaatcccttactgttagacattttgatttgccactttatcactgttatacatggagcgatgctcccagcttgagtttaagaagaattcagacctgccaggagcctctgtaaagagcctaggggaggccagacgccgtggctcacgcctgtaatcctaacactttgggaggccgagacaggcagattgtctgagctcaggagtttgagaccagccagggcaacacggcgaaaccccgtctctactaaaatacaaaaaagtagccgggcgtggtggtgggcacctgtagtcccagctactcgggaggctgaggcaggagaattgcttgaacccgggaggcggaggttgcagtgatccaagatcgcaccactgcactccagcctgggtgacagagcgagactccgtctccaaaaaaaaaaaaaaaagagcccagggcagactgcaagaagcccacatgcagggtgaggaagagctaggccagctcaggtcatcctagggaaaactcttagctgtccatggaacaggtgactgagtgccatcagagttagggagagggtgggctgaggagaattattcctcagtttgtctccaggtgcatccccctgtagacttaagccccccacagagagatgggtagcataacaagtgaaagaaccaagtcggggattgtggctcgtgcctgtagtctcagctgcttgggaggttggggtgggaggatggcttgagcccaggagtttgtgtctgccctgggcaacacagctttattaggaaaaagggaaggggaaggggaaagggaagggagagagaggaaggaagggagaaagagacagagagaaggagagagtgagagaaagaaaaggaaggaaggaaggaaggaaggaaggaaggaaggaaggaaggaaaggagggaggaaggggaggagaggggaggggagggagggaggaaggggaagggaagggaaggaaggaagggaagcgaaggaaggaagggaagggaaggaagaaggaaggaagagagagaggaaagaaggaagaaagaaagagaggggagggagagaaaaggagagaggaaggaagggagggagggaaggaaagaaggaagggagggaaggagggaaggaagggaggaaacaagggagggagggagggaaagcgggagagagagagagagaaagaaaagaaaagaagaaggaaggaaggaaggaagaaaggaaggaaggaaggaaaatctaagagaatagaaactcaggataatgattttggttttggggtttttttgtttagctttattttctaaattttctttgagatgaagtcttcctctgtcacccaggctggagtgcagtggcacaatctcggctcattgcaacctccacctcccaggttcaagcaattcttctgtctcagcctctccagtaactgggactacaggttcacgccaccaggcccagctaatttttgtatttttaatagagatgggatttcaccatattggtcaggctggtctcgaactcctgaccgcaggtgatctacccacctcggcctcccaaagtgctgggattacaggcatgagccactgtgcctggccatttttttttttttttttttttgagacagagtcttgctctgtcacccaggctggggtgcaatggcacgatctcagctcacaacaacctctgcctcccaggttcaagcaattctcctgcctcagcctctcaagtaactgggactacaggcgcatgccaccacgcctagctaatttttgtatttttagtagaggcagggtttcaccatgttggccaggttggkcttgaactcctgacctcaaatgatccgctcccctctgcttcccaaagtgctgggattacaggcatgaaccactgcgccgggcctttttttttttttttttttttagatgtagtttcgctcttgttgcccaggctggagtgcaacggtgcgatctcagatcactgcaccctccacctcctgggttcaagtgatttttctgcatcacactcccgagtagctgggattacaggcatgggccaccatgcccagctaattttgtatttttagtagacacggggtttcgccatgttggtcaggctgatcttgaattcctgacctcaggtgatccacccgccttggccttccatagtgctgggatcacaggcgtgagccaccatgcccggcccatattttctaaattttctacmgtaaacctttgtacctaataagaggcactttgctaggtactgagagtgcagtgttgagcacatattaattatcttgtttcttcaatagtgcattcgtttttgtattttattatttctgtcctacttcatttatggttttattcttttccttccttccttccttcctccctccctccctctttctgtctgtctgtctgtctttctttctttctttttactgttattttatggtttttttttgagacggagtttcgctcttattgcccaggctggagtacaatggtgcaatctcggctcacctcaaccttcgcctcccgggtttaagcgattctcctgcctcagcgtcccaagtagctgggatcacaggcacacgccaccacgcctggctaattttgtatttttagtacagacagggtttccccatgttggtcaggctggtctcgaactcccgacctcaggtgatcgcccacctcagcctcccaaagtgctgggattacaggtgtgagccatcgcacccagcctatttatttattatttatttttattttttgagacagagtcttgctctgtcacccaggctggagtgcagtggagcgatctcggctcaccacaacctccacctcctgggttsaagcaattctcctgtctcagtctcctgagtagctgggactataggggcccgccacttcgcccggctaatttttgtatttttagtagagactgggtttcgccatgtttggccaggccagtctcgaacttctggcctcaagtgatccacccggcttggcctcccaaagtgctgggattacaggcgggagtcaccgcacccagcctgttcttctttaaatctctttaacttgaaaggttagctttgttttcattttcaatctttaaaaaaaaaatactttaatactattaattttccttgaagtgtttctttagctacacatgataagttttgatatgtagttctcctattgtcatttaattataagtaatttatagactccattgtgagttcccctttaatctttgagggtataatttacagttacaaacatgtgtcgatcttcattatttgtagttctatatttatgaatgcacctactcactaaaattcatttgtaactccaaagtcagtgctcgaagtgcttttgtagtcattcgtggacactcgcagaggggtgaaacatgagtcactggatgcacatatgcatgttcccagctgtttcagctctcctactgtaaaaaaatacctttttgtgtatatttaatgccccatttttctcatttttgtggtttttgttgattttgctgtttaaaatagcctctaaggatgatgctgagtgctgtcttgcattcctaagcacaagaggctgtaatgtgccttatgtgggtttgatcacaagcatgagttacagtgccattggccatgagttcagtgctaatgaatcaacaacatgtatttcatatggagtttttaaacagaaatatacacaaaacaaggttatatattgactgattgatgaaaatattgtggccaaaggcttggaggaacccaaccctgtatttccactagaaacaatggttcagtattcactaattcagtgttttcagtgactttgtagaactaccacaaatgagaatggcatggctgtgtgtgtatatgtggtctttttttttttttctgagacagagtttcactcttggtgcccatgctggagtgcaatggtgcgatcttggctcactgcaacctccacctcccaggttcaaacgattctcctgcctcagcctcccaggtagctgggattacaggcaggtgccaccacgcctggctaattttgtattttttagtagagacgaagtttcaccatgttggtcaggctggtctcgaactcctgacctcaggtgatcctcccacctcaacctcccaaagtggtgagattacgggtgtgggccactgtgccctgccgtgtatggggcctttttattgttaatttataatttaattactttgtggtcagtgaatggttttcgtaacactgatctttttttttttttttttttttgagacagagtctcgctctgttgcccaggctggagtgtagtggtaagatctcagctcactgaaacctctgcctcctgggttcaagtgattctcctgcctcagcctcctgcgtagctgggattacagacaggccggcaccaccaagcctggctaattgttttgtattttcagtagagatggggtttcactatgttggccaggctggtcttgaactcctgacctggtgatctgcacaactcagcctcccaaagtgataggattacaaacatgagacaccgtgccctgcccaaagctgatatatttgttagcagattatttctcttatttatttatttatttattttgagacagagttttgctcttgttgcccaggctggagtgcgatgatgcgatcttggctcactgcaacctctgcctcctgggttcaagcgagtcccctgcctcagcctcctgagtagctggggttacaggcgtgcaccaccatgcccagctaattttggattttttttttttttagtagagatagggtttcaccatgttggtcaggctggtctcaaactcctgacctcaagtgatccacctgcctcgggctcccaaggtgctgaggttacaggcatgagccattgcgcctagccaattcgtcttattatcttataatgtctctcttttgtaatggttttccctttatcttctattttatatttatttatttatttttttgagacggagtctcgctctgtcaccaggctggagtgcagtggcgatctcggttcactgcaatctccgctaattgcaatctcctctaattgcaatctccgcctcctgggttcaagcaattctcctgcctcagcttcccgagtagctgggattacaggtatgcgccaccacgccggctaattttgtatttttagtagagacagagtttctccatgttggtcaggctggtctcgaactcccgacttcaggtgatccacccacctcagcctcccaaagtgctgggattacaggcgtgagcctccatacctggcaagtcatgtagggtctgacaatgaatataaaaggggttatttacataaaagtttgtgaagatattagcttagagaggcaagttaattatggtacttagagataaacaggcacatccttttatgtatatctagtgaagtcagttgctgtaatctattctgtttaaaaactgaactatactaggtctgaataacaagataatgtacatttcccctagaagataggaacgacaactcacacctgtgtgccattcctttttttcttcttctgatagtgattggacctccccaaacgacctaactcagaggaatttgggcatagtgtactagctttcttcccatgaaacatccctgtttgtgttgtatatttgaggtagtagcaacgtgattaagaatgtggactctaactggccaggcgcggtggctcacgcctgtaatcccagcactttgggaggccgaggtgggcagatcactaggtcaggagatcgagactatcctggctaacacagtgaaaccctgcctctactaaatatacaaaaaattagccaggcatggtggcaggtgcctgtagtcccagctactcggaaggctgaagcaggagaatggcgtgaacccaggaggcagagcttgcagtgagccaagatcgcgccactgcactccagcctgggcaacaggctcaaaaaaaaaaaaaaaaaaaaaagaatgtggactctagaatcaatcagttggctctgggttaaaatctcagccagctctactacctactagctgtttgagactgacgagtttcctcatctatttattttttaaaaaacagtaataacagtacttgattcacagggttgttaacattgagatgatgcatgtggactgttctgccagttttctggtatcccatggtgagtgctgtagctacggtgagcattgtgtgttataatcacaggtagtaggagatgggaaagcaggggccatgacaggaggccaatccagagaggttcgtgggttacaggaagaagacagataaggctatagcatgaagcatattagttcgaggaaggatttaaggtgcggaggccagatctgaaagtaatgaaacaactccagtgcaactgtttcataactggttctctttgattcttctagaaagccatgtcctgccaccgcagccagctcctctggttccgccgcctctacattatcttctcccggtacatgagaatcaactcactgagcttcctctgaagccttgaagggttttcagrkccaaggaacaaaggggaaaatagacaaaggagtgcagaggacctggcctggcactggcttatttrcctgagctcaaggagatccccgctggagcagcctctgcaaaagggagcccatgtaggccaggggctgtccaaactccagcttcttcccctgggaaaaaacccaaagaaccaaaaacaaaccaccccaaggataataatagctacactgctagcttctcaagttcttgtgaaaaacaatttacataatgacacagtagatgtggaacacctagcccagtgcctgggcaggtccctattatcataaatgaacataaaagtgctctaaaaacactccacagatgtgacttttacattgtttccaaagcaggttcaccaaaaacacatacacaaaatgcaacagtgtgtgttgaattggttcaatcataattcctttgatttttcttgtatcagaatgtgggtctaggaaaaacttgctctatttaacaggacagctctgattgaagcatccaagtacaggtcactggggtgggcactgttttatacagagacgattacaagaactctgcctcaaagagcttacaatcaaatatgtcagctctcagtctttttggagaagtaggaagtaggaagataaatctgagacttaaaaaaacacaaaacattcaagaacctgatgtcttaaaattgtcctacgaacaaaagctctctgaaagctctggcttggaaactactctcagaatccagctaacgctccagggaagtggcctgagtcagggaagctaagtggtgaagagcacaggctggtagtcctgcgattgaagccagaatgaccagctgtgtaaccaaaggcaaggtgctgaacctttctctgcctcaattctctcatctgcaaaatgggaaataataatgatcccaacctcagagaactgaacaagataatacatgaaggtgcatatcaaagagtctcacatgctctgctgggtaagtatgccctccacccgccacaggaaacactgaattgcttctccatagctgcaggttagagacctgcttgttcagacactccacctcaacttgccctcctttgcttagtgtcaccattatcttgaatgcctcctaggggccacataagactaatagagctattaggctctgaagccggaatcaaaaatgcaaatctggttatgtgatttgtctacttaaactttgtcaatagctcctaatagccttcatgtgaaaatgtgaccagaagcacgttactaacactggctagagtgcagtaggagagtgtggtaggacaggctgaccyctgccctgttactaggaagacagacactcacccagcctttctgaacagcaactctgctaagagcttttaaaatatgcatattctatgacctaaggaatacttagaaaatcaaaattatatacacactggctgggcgcagtggttcacatctgtaatcccagcactttgggaggtcaaggagggtggatcacttgaggccaggagttcgagacaagcctggccaatgtggcaaaaccccgtgtctactaaaaatacaaaaattagccaggcatggtgccgcaggcctgtggtcccagctactcggaaggctgaggcacaaggattgcttgaacccagaaggcggaggctgcagtgagctgagatcgcgccactgcactccagcctgggcgacagagccctgtctccaaaaaaacaacaacaattatacacacaaagattatcattgtattatttataatagcaaaactggaaaaatccagtgatgcagttgtgttttgtaacaaggaagaacgttcacactattaaatttttaaaagcgggttaggaatagcacaatcccatttttgttgaataaatatatacacaagtatataaataaatacatatatatcaaaagatatatatccaaaagataaatactagctggcaaggtaatctttcaacaatgaacatttataattgtaaaggactttgttgttgttgtttatggatcatttggatgtgagaattttgatatcatgtgaagttttttaaaaagtgtgtttataggcccggccgcggtggctcatgcctgtaatcccagcactttgggaggctgaggcgggcagatcacaagtcaagagatcgagaccatcctggccaacatggtgaaacctcgtgtctactaaaaatacaaaaattagctgggcatgggggcgggcacctgtagtcccagctactcaggcggctgaggtaggcaaattgcttgaacctgggaggcggagattgcagtgagccgagatcgcgccacagcactccagcctgacaacagagcgagactccatctaaaaaaaaaagtgtgtataggccaggtgcagtggctcacacctgtaatcccagcacttcgggaggctgatgcaggaggattacttgagctcaggagtttgaaaccagcctgagcaacatagtaagaccccatcttttcaaaatattttaaaattacccaggcttggtggggtgtatgtatagtcccagctactcaggaggctgaagtgagaagatcacttgtgcccaggaggtcgaggctgcagtgagccatgatcataccactgcactccagcctaggccacagaatgagactgcctcaaaaaaaaaaaaaaaaaaaaaatatatatatatatatatatatatattaatcttagaggttagaaagatgaacaaaattatcaatatttgtttctggatggtgagacttaaaacatttcctgcctcttttgttttactgtacattccaacttttttgaaataattaagtagaagtcggccagtgcggtggctcacgcctataatcccagctacttgggaggctgaggcacaattgcttgaacccgggaggcggaggttgcagtgagtcgagatcacaccactgcactccagccttggcgatagagggagactccatctcaaaaaaataaaataaaataaaaataaataagatttaaaaaataaaaaaaagagggttgctgcatctgagactgcaggttctactctgggttctggaaagaggacagaccagaactaggctctccttggtaccagcagagagccaagggactgcagcacaggagggaaggaagcccctggaggccagttagggcagccactagcagtgccttcatgagaaaagtaccctccagattcaatgcagccctggggacacttgtcctggcaagaaaagagtgtcctcgtgcaaattatcaacaagtagtctttcctgcctgcaaacacactccctccccagggacagccacaaacagccttgtagaaggagcagagacttaagcatccacttagccagatgctcttgtttggttaacaacctgcaaaactaggcagcagtagccccaaagcctggagcaaaaatcagaatttcatggttccttgaaggaacaccaaaaaaaaaaaaaaaagaagaagagagagaatcctctcctccaactgcccaaatagaaaggatctcagtgaattaagaatcctctgggaggggcagcaatcccacttgctcagagacctggagagtgaccaggctggggtgggtgtgctgaagtcaggagagggtcaccccttgtcagagagacctgcaaacaatcccccacccaccccatcctcggcaagggctgatggtttgccagttctcacctcggtccagagagcagaaactgccaacttcaaccactccccgcttggctactactcagcagccctgactcattaagaaaacacaaaaatcgagagcaaccagacacaatacaaaaggggaaccctcacctgaggaggctcagaaggaggggaatagggcagatctcactgaagtagcaattaaatggaagagactttatcagaaacagtagtgaaagcccgggcactgacccagacaaaaaagcacacttctccgtggtgactaaattagtaatgtggaatatcaagtagaagatatattgcagaacaaagaggttaaaaagccaagaaatggaaataagggtgggaaagagatttgaaaacacattaaggagagccaacgtgaataatggaagttccagaaggagcaaaagcaggaaggtaataaaggagaacttccgtaatctgaaggagactgagtacactgaaagagcccgccaaatcctaggcagctttgatttttaaaacagatgcacaaatatgctgcgaaattcctaaattcccagtgagaagggggagattaaagtattcaaaaagtctcctcttggggccagccaccgtggctcacacctgtaatcccagcactttgggaggctgagactggcggatcacttgaggtcaggagttcgagaccagcctggccaacgtggcgaaaccctgtctctactaaaaatacaaaaattagccaggcgtggtggcgcatgcctgtaatcccagctacttgtgaggctgaggcagcagaatcacttgaacccaggaggcagaagttgcagtgagccaagattgtgtcattgcactccagtctgggctacagagtgagactctgtttcaaaaaaaaaaaaaaaaccaggccgggcgtggtggctcatgcctgtaatcccagcactttgggaggccgaggcgggtggatcatgaagtgaagagatcaagaccatcctggccaacatggtgaaaccccgtctctactaaaaatacaaaaattagctgggcatggtggtgcgcgcctgtactcccagctactcgggaggctgaggcatgagaatcgcttgaacccaggagacagaggttgcagtgagccgagattgtgccactgcactccagcctggcaacagagcgagacttcatcaaaaaaaaaaaaaaaaaaggtgtcctttgcggccaaggggaagctgggctgggggtaaagctgcatggtgcagggtgacaaatagacaactgatgggctgcagtctggattgtgaggaactgaaaggtatacagttccagagctgaaactaaaaagcatgggatctcaattaacaaagaggaaagcaggaaatgaagaaaaacttaaaagactgcaaaagtaagaaaaaaggaaaatagtataaaatgtaataaatataatagaagtaatacaaaaagaataaaatcagagctacttcaaaaaatatgaacaggctgaatttccagaccaaaacagactgtgaaatcaatgtgttagaaaacaaaatctagctacatctaaaagtaacaaaggctaaaaataaaaggatgaaccatataccatgtagcaggagaacaaaaagaaggaagagcaacaccagaaatccaggccaaacccaatatgacaccaagaagcattaaattggacaaagatgggtatgttaacaggttcactccatgagatgacaggcacccaacatcacagtagccagatacataaaacaaaacctcccagacatacaagacctttattaaaagacaaaaacaaacaagacaccacgataatagtaggaggcctcagtattcttccagaattttgaaaaattgagttggcaaaaaataacatcaaatattggaataaagcaaacattcacttatgtgatagaatgtttacaaaagttgactgtttattggccactgataaatccatttatttatttatttatttgagaccaggtcttgttctgtcacccaggcttggaatgcagtggtgtgataacagctcaccgcagcctcaaattcctgggctcaaggaaccctctgcttcagcctcccaagtagctgggactacaggcatgtgccaccacccccggttttttgtgggttttgtttgtttgtttgtttgaaatggagtctcactctgttgcacaggctggagtgcagtggtatgatcttgactcactgtccgccttccgggttcaagcgattctcctgcctcagcctcccgagtagctgggattacagatgtgcgccaccacgcccagctaatttttgtattttcagtagagacaggattttagcatgttggccaggctggtctcaaactcctgtcctcaggtgatctgcctgcctcggcctccgaaagtgctgggattacaggcgtaagccaccacatcctgccgttctttttgttgttgtttgtttgtttgtttgttttaatgagacgaggtgtcgctatgttgaccactttggcctcccaaaacattgggactgcaggcataagccactgcacccagcagagaaatccctaataaattccctactgtagagatttaataggccacattcttggatcataattaaataacatgcaagtaaataataaa
